United States Patent Application Publication US 2006/0194265 A1 - sequence listing, part 8

SEQ ID NO: 1208 - DNA, 177049 bp, Mus musculus
  misc_feature (1)...(177049): n = A,T,C or G
tgtatgtgcatctgccaaccccctgaaggatgtagactgtaccttggccatgtttggatctgcctaggatggaggaggtacccagaaagtattgttgacttaaaccaaaagagggggtctgagcagtttaggcagtgcctttgaagatcttggtaaagaagtgggatgctaccagttgtgggatgtacctaccaccaaaggaacccagagtccttttccccagtgatcagatcagagagacatgacaagtgagaagctttgcacacttgcccaagtgtagagagtatagggacccaggatggaagaccttgaggtggtaaatttggaaagctttaccgtgtgacctagagatagatagtggctggcagatcccacaggtcttctgtacaggggtccttcattgattctgtgtgccagaagatgttttcagtggagtcttttcttggtaaatgaactgttactggcagtctttgtgcatagctagagcttttctatgtacatttgaccccaagccaacccaaacttgcttttataattgcagaatatttggatgtcggtttctgatttcaggttacacgtgattggtagtgggggccagtggctaattctgtctgaatttgtgtgtctgacttgcctttgtccccatgttttggctaaaccttctttggcggtggcttttttttttttttttttttacagcctttgaaagttaagtcagccaacttcttatctattgctgaagtgcaaatcctaggattagtgctgagtgggccctgatggtgtgggtgggacctctgcctgccctgagccaaccgcccagctcccatgccaactcctatagttcttggaatgagagctagggatgcagtaggtcctggaaaacaggtaggacactgtcacctaggggttttgctggatgacagtgactccaataacctactgcatctagaatgactgctctctgcctgttggtaaagtgttcctnnnnnnnnnnnnnnnnnnnngttggtaagtgttcctcgccccccccacctccccacccccccaccactcgcacctcccctccccccgtacctgctgattcaggagactgctctatcagcctcctctactcctggctatgaggtttctcagagaccagatgtctttaaggttaccctgctgacctctccatttgtcacttttgggcatattggggacagcttcctaaggcagacttctctctacctggtggttatagggtctctggactaccaaggggtctcaggacaaagcattgcagaggctcctggagggactgcgtccattcgtatcataatagagaggggcattgtttcacctttgcccctcagggcagcatgtgaccctgacagtatagcaggttagatatagagtgacttatctagttaaggggacagagaatcaggagaggtgaataagcagataccaggattgggctccagggacacaaatgtcatgtaaaatttgtacttttaaacacacacacacacacacacacacacacacacacacacacacacacacacacacgggggcaaggacacactgattattggagccattctttccttgtaaatgctccattaaactacccatgggggacctttaagtgcatactccattggagtctgcaggggaccaaattagccttccctgcagccatctagtttggaacagaggccacctgccagtgcttcacccagtagcgttttactggggttgcactgggttatcaaaagggagcaagcgcatccagtggtacccaggggtcacctttccccatttactatgggacatctcagcatacttatcccacacatgccctgtgacctcaggtgacccagcgacttggagaaacagtagctacttttagttcttgctaccctgtaatgtctgttttggggggtctctgggacctaccagaagctccctgtgaaacccatgtttgaattttgccttgcttaccaggtaacttgtagttatctggctggaagagactatctaattctttctgccctttttccctgtgagaaaaggaggccaaaccaggtcacatgcatgtgaggtctatcataatagccatctgtccctctgtcttggcctctttctcctgtcctcaggcattgtgcccctgcctctgaggacacctgccaccatttgtgcatattctattcaacatcagtagcctggaaccttggccccaccacaaggcacaggtagtggttgatcaagtggccccactcaaacgcaagtttccttcaactgggcaaaaaccaaaaagaccatattagcagggaaggatacataatgctacttagtaaaaatatataatttgtccacttattctcttatagatttgggtgtttagcccactttttcatttacagctattgagtgtttagtaatgggatcagccttgggaatctaatgatgcgtgaagcagaaatgaccccaggccctatacacgtggccagcttttgagagagacagtattagagaggtaatttttaaaccttattttaggctggtaagtattataaatatctatgatgtacaacatgttttagtatatagagacattgtagaatgaaggacttaagctaattaacatacccatatttgcctatatacttttttatggcaaaaacatttagaatctcctcttagcaagttcctaccctattctgctttgttgttactcatgctgttctatggttgttatccttggcttcctcctatccaacagaagtctaatttccttccaaccacgactctctttgcttatttctttgcctttttgtagatgtcacatgctggtgaagtcatgagtatttgtttgactttctgtgcttagcttatttcactggacattatatcctccaggttcacccacatgttgcaagtgatggcattttcttcttgcagagtattttcatttatctgtgcatctccgatggatacatagggtagccctacatgttgaccgatgtgtgcagtactgctgtgtgcttggtagcacccgtctgtcttcaaccttctaatttcattgtctttggtcatttccatcttggagaattgttatatcaaatagtagttccattttaaagtcttggttggatctcattctatttcacatatgaacatactagtttataatctcaccaactatattcaaggattctgtttctccatgtttaccaacacttaatctttccacttttgtctgatagccattgccatcaggtataaagtgctatttagttaggtgcaattccatttgtgtaatttttgtatgtgattatattgtagctgtcttcagacgcaccagaagagggcatcagatcccattacagatggttgtgagccaccatgtggttgctggaaattgaactcaggtcctctggaaaagcagtcagtgctcttaactgctgagccatttttgttgcctttgtttttggggtcatagtcaagaaatctttattcagagtcaaatgtaaagaaaatttactgtttataaaaattaacaatttgagtattttttccagatggttattggtaattcttatgtcatacacacacacacacacacacacatatatacatacatacatatgtatgtatatgtatatgtattgcctacttgtatccttggggggaattttttaaaaatattatattcttgctaatgatttaagttccctatatattttggatgctaaccatttttcagctgtatagcttgcaattattttctttcattttgttagttgtctattattgacacattttctgtgcataagctttctagtttggtgcaattccatttatatattttttgcttttgttgcctgtgcttttggtgtcctatttaaaaagtcttggctcagatcaaatggaaagaaattttactctgttttctcccagtaattctacttagtattttaatgtttaagtctttgatccaatttgtttggctgtgtatgtgttgtaagataaagagcatatttcctgcttttgcctatggatgcccagttttaccaggaacaattttttaaagatactgttctttccccattgtgtgttattggcacctttgtcaaagatcagttggttgtgaatgtataggtttatttctataatctttggtagaggggtaactttttaatgaattggcagtatgaattctaatagaatttggtaggatataacagtgggctccagttttgtctgggaagtcaataaaggttttgctgagaaagtattatttaagttgagccttgaaggataggtaaaacttatctgttaaaatggagtggaaagatgctatatgaagaagaaatacatgtgaatggttgcactctggtccagggtcatgcatggcatgaattggtgactgagtgcaggctaggagacaacagctatgataggtgtgtgctctatgcttccccactctacagcacaaggcttgttttctatcctcgtgtcatgaagctgtagcttcactctaaagagggaagagtttatatttggaggcaagaacattgggttcagtggagcaaacgaggcaaagacatggtgcatgcatgtgtgagtgaaataacagaccggtgtggtgcagagtagagggttctcatagataggaagcaggaaagttggagagacaaactgtaaggtagagagatataaggatgactttaaccctgggctgcagagaagctaaaatttgaggaccagttatttattaattctagtactgtgaacagacatcatgaccaaggcaacccttatcagagaaaacatttaaatgggggcttactgatagattcagaaattgagttcattgtcatcatggtagggatcatggcagtgtccacgcaggtgttggaacagtagctgagagctacatattgatctatagtcagagagagaaagaaagccactgagcctggggtaggcttttgaaatctcaaagacttcccccactctagtgatacatttcctctaagaaggccatgcctcctaatccttccaatcctttcaaatagtgccactcactgggcccagtggggtcagtcgtattcaaattatcacaaggtaagatggaggcagcctttatatcagggagttgactgttttactttagactttgttttagaaagaatttataataacttagatccttgttgatacatatcctaggatcaaaaattgttgtgttttagttttctttatgtttgatcgcattactttattcttcacctttttccttcactgtttttctagtagcacccatgagtattttatgcatgctgtgtgtggtggtaggtcttagagttatacggacaataaggaatgatattcaaaaacagggagctagtacctgcacacacacacacacaggcatgaatgggatagcttccttctcacaagcaaggaaaaccttctcaaagacatgggcatgtgggtggatgagcaaagccaaggggcgagtgctcttggcctctgtagatctcttgagggctctaaggttagttactgaattttgctaaggaggaactagctcaggatggatgaatagatggatgcatgcatggacaggtgggtgggcatgtgatagacatatgaatgttgatgcaacaacacacagtaaaagaatcctgaagaaaagaaccaagtattctggaatctttcagcccctgctagatgacagtttttggtttcttaaaggccttttgtagggtgaagtggttagacactgaaaataagttcagaaaatgttgacttagagactgtcccaatgttcagatcactgtttaaaaagatagaccattagattttaggactgggggaatggctaataggtaagagcttgtaagtgggtaagggtaagtaagtataagcagggaaacccaagtttgatccccagaaccaatgtggaaaatctaggcaatttgatatgcactcgtgttcctaggaattggtaggtaggtagagatagctggattcctggtgctctgtagctagcaagtcccttgatatgttctaaaacataaaacaaggtgaacagctcttaagaaagagtaacacttgagattggtctctgacttccacatgtgtgtgtgtgtgtgtgtgtgtgtgtgtgtgtgtgtgtgtgtgtgtacactgcacccatatgtacatgcatccacaacaaacccacagccatactacaaagaagaactagatttgagcctatatttccctgatagtttaaagtgtcataggagacttggaccttatataaagtgcccttctaaagggaagtttgactggcattgctcaataaggtcctctgccagagaaaagaaagcactgctgggggcagacagagaggattggaatcatggagtcttcctgtttcacagggtgggtcacatttgtgatacagcttttgatctggctttgtgaagaaggattagctcatttcgaatctagaatgttctcacctgccccttccccaacttctcctgtctttcctttgctgtggcacagtcttggttttctcttctgtctctgctacaaacttctgtgctgcaagtcatttggcttctgtacctccaaactctttttggtgttttctggcttccttcttaccttccttttcaaattcattttttttttcttcaaataaacaatccatttgaagggggataattgtcatacttcctcaatttttatttgaccaaaataataataaccctcaatttgtttaatgtagaggtactcttgtctctcaggagtctttggcaatgtcagaattgaggaatgaatgtccctagtttataggacaactggtctaccaggttgtgcttgttcatttggcatttgacagaatttctgtaacaaccatttttatagcaagcttctcttttttataacgcattccatcaagtaattcattaaagattttggaaagagggaccaacattttttaaaaggagggtgaggtgaggaagggaggattataaaaataaacccagacccttcaaccattcagttacactaatgtccctcatattattgtggcacagttacttataaataaaaggcagagtgtgtttggtaggtgtactctctgttctttatcttgtttttctgctctgaagtatggtgctgtcttgacgtagggatggaactgctatgaatattgatggcatggcagccaaagcttttttcctgtctggcctagtaaataaagctgagaggatgaaagagaagaggaattttcaagacagtgtgctgtttttagattatcttgttcccttagaactaggagtcttgaaaacatattgatgatgtacatttggtggtaggggcagctctgagtaaagtaggtggatatttcagaaatgtgggcctctggtttaaagtcacagaataataattcctcctcctcctcctcctccttgtcctttgagttttttagagtttgtgctccttcttggatctctacacaccttccagtgaatcatcaaaccctgactctcactgtattaattgtattgtgaattgggtgctgggtggtgtgtcctcatgttcctatgaggacatccactcaaagatacagcaggaggaggataaagaacctgggttgtaaacacagcagcagccccgtgggtctgcatatgacctgtcaggtcatggtgcataggctgccttgggagcaccttcaaggcggcttagcccagaggatctgactgtgtgaggggaatgggggcaggggtgggaaggatgaccagatggtggagggaggggtacacaggatgagccagcagagaactgaatctgttcgaaggaccaggaggcaggaataggtagggattgggtatgagttagtgctttaacatcataagcatcctgattctggttaactcaaaagaaattcttagactgttgtgatgctcttccaaggattcacagagcactggatggcaggtttagaaattacaggagccagggctggctaggtgtctttgcaggtaggaatgcttgttgccgagaccaagacctgaattcaatctccttatcaaatacagtggaatgagagaactgatgccttcccatggtctccatatgtatatgtacatacacacacacagatgcacatgcatacacacacatatacacacatacacataaacatggatgaacatgcacacacacatggatgcacatgcacacacatacacacacatatacacacatgcacatacacatggatgaatatgcacacacacacacactgaatgttaagggcccagaatgttctagggttaaggtcggcaaaactgatctggcttttctataaccaggggggagtaaacaagatgggtgctgtcttggatgcacaggctgcagttggttattaccctggtggcccagagggacgatgctggtgacaagccatgagaaatctctaccctaggacagccagagacaggagccagctgtctagccgcagaggcctgcatcctagttgtagtgaagacaacacttccattgaaatgcagaagaggctgtagctactgcaagccaatgtgtgcgtagacatgttacatttttaggaaggcaggcctgttggagtcatcctgcaatgaatattttaaaagaggatttccaaaataagaagttcctatccagaagcatttccttttaacagcgtacatttccatttataaatccacatctacaatagtggtcacacagtgtctgccttcttttgtgtgaccatggggaaaagaaaggacccaggagctgtggccaagacccttggcttcagcacaagtaggggagtgctcttatgctaactctggattttagaggttctctctgtatgtgtttaaaactcctgtgaacccttccaggccattctttgcaaggatgggactggagttgggaagtttttaaatgctggttccttctggggtacctggcatatggaggaaaagctcactgtttcctgagccatagttactatagccttctgtagtagccatgttagtaagtgaagtccattagtctaccctaaggatgatagtagctgaggactctagagcccacagagaaaagttctcattcttgagattttgttttgttttgttaagtaaattaaagccagagaatgctggttggatactcatggccctgtccattgagtttctatcaaatttatagaaagagcctatgtgtttagacctgttgactggggcatccttgcttggggggtaatgtgggttggagttggagaggttctagccatcaggcaatgctgcagatggatgtggcaatcagatgggagcagacatgggaactgagataaaggcggagctgtatctccaggaggctggttaggagggagtccatcactggtgccagccaggaagaggagacaggccagtattaggcatctgagatccctgccctcttctctgtgctgagggcagtcagatcagaataagatgtcagaggaaaacccaagaaaaaaaaataagggtaaagtccattatgcatctgttctcccagacggtgtgttctgtgcagaaaccactgtcagaatgcttgtttcatcctggtgcttttctgggcctgatctggcaatcttggagaaaacatgctgtgttgtgcaaatgtgtgcaaatagaaaacatgcccatgatgtcccaggcaggctcactgctcatgcatcagggcaggtggcaaaatgcagtaatgcagcctggaatgacagtacttaacacttagctgcttatgagaaattcagcatcaaaattgaaatgttttcctggtccacatgcagggtagtgattctagttctcatgataacattgtctgttatcatgtctgtgcgtggtggggggggggtgcttctgtctctgagctattgattctgatcattgattctttctttctccacccttggtgtgttcctttctctttacaggaaaaagtagaatatgccttcctgattatttttacagtggagacatttctgaagattatagcgtatggactgttgctgcatcctaatgcttacgttaggaatggatggaatttactggattttgttatagtaattgtagggtaagtccttggtttgggaaaaacgtttatctgggaatggaggtgagggctggatggtaaagggaacacaagccttcttgggggaggtggttattcttatgcccgtgatggcatcaggatctagcaggggttcttttaatgctgacagggctgctgtcaatccctgggcagaggcctgggtgaagagctctcatgattggtgtgcttggggaagtcagtgacaggctgttagaggaagtctcagccgctaatgagagatgattcacctcacagggcctcaagtctccacaaatagacctgcctggttggtgggtggagtcagtggtgaatgcagctcctaaaagctagcaccctgctagttaaaaccatgtgtatcatacgagagagcctttcttgctgtgcggtgcgctgctgtttaacatcccttgagcagagctattatgtttttatgctgagttgtgggagaaaccttggcatgccactttcccattttaaataacaaaacaagcgtctgaataatgtcacatatctggcataaaataaaataaactggaaaatgcagagaagcaggtgttcttttaataccctcttgtgagaggaagacgctggtagatttagttaaaggagtatgttacaatgaaaaatagaggtctgtgttgccccattccttccacaccctgagttgttgccagcagaggaaacacaaatcaggtctttggagcaaacatccaccaagggagacaagatgtagccctgttttgggactccttacctgggctgttctgtaagttacccctaaaattaggaatactctcttatttccatcaagagagctcttaaaagatgtatttgtttttactttatgtatgtgattatttcacctgcacatatgtctgggtacttcatgcatgtctagcctccatgggatccagcagagggtgtcagatccctcaaactggaataccatgattttgagtcactgtgagggtgcagggaatcaaacccaagtcctctgtcagagtagcaggtgctcttcactgctgagtcctctctccagtttggagagagcttttaaaaccatctctctgccttcctctttgtggctttattcagttgctgtttgcaggtaacttgcagcttggttatcttctggattatctgtatcctgattgcactggtttttcattggagatgactttttctgtctgtttggagagtagcttacgtttggtggggtgtccttttaccccggggaatgaaaataaggaaggcccaaagtggtggcccactggatggttatacttaccaggaagaaagctagcttttataaaacctcccattgtacattggcacctatgtgtgtattgcagaaataatgtatccaaaatgaataggtggcagataggcgttaaggcagaagcctcctcttgtttggaacacctgtcacgggctggcaaactggagccgcagatgtctctttgttctgggagagtcttgtgctttcctgccactggacttttattagactagagaatggagatacatagcttcacttcttatgtccccatgtcaccttagctttttctctgctggaacattttgcccaactagaacagcacaggaagagggaacagagccaatatggcagtcttaccaagtttaagagataaaactccaggagacctgagtaacacaaaatgggaagggagagaactagttgagaactggagagaggagagccctgcacctgggccttgaggtccacaggagtctcagctgaaactgagctgtagtccacgaggccaagcaaagaagtgttaggggaaagagaaagacagggtgcaggaactataagataaataataaccagtttcctaagactaaggggtgtttgtgatccaaatacccagagtaaatcactgtattgaacattgtggactgttaataaactgaagggctttttgtagtagagtcagcctagatctagactatggcttgggaaaccatgagcaggggatcaaatcctagctcatctggcctgccactgatttttataaataaagttttattgtaacatagctgcactcatttgttgtcatcattgaatggagaagtccactgtcttggccctttattgaaaaactgtgctatcccttctgtagaataaagactctttgaaaacagtgttttgagaatgagcctgaaggagagagaactgataaacaagtaacttaattacatgtaaaaatgaacaaacaaacaaaaaccaaaaaacccctaaacttttcaaaggaaaaataaaatctaaatacttagatgatcattctaagtacctcacctgcactgaggtaatactagatataagagggagtgtgacccctaaaaggaggaaattctatgactagaaatagacccagaagttacagagacaatgcaaggaacttcacaggcatctaaaaacagcaattacgaatttgttcgtggatgtaagggaacataagactatagtggagaaagatggaacaataaaaaagggacacatgagacttgaaggactggaaggtgtgtctgaaacgaaaacattccttagatttgctcactagtacatcaggcagtgctaaagagaaacacatcaggggatgtgaagatgtggcagtaaataaataattaaggaaatgaataccacctcacggacttgtgaattaccaaatgttctaaagtgtgcatttggaatattaggaaagaaagactggagagatggctcagcagttaagagcactatctgctcttgcagagaacctgggtttggttcccagaacccatgaggtagctcacaaccatctataattccaagatccaggggattcatgctcttctggtgtctgtggatacctacacacacatggtgcacataaaacacatacaagtgtgtacatatacacacccaaatataccagtaaatcttgttttgaaaggaggagagagaaaaagaaagcccctgaggaaatggttctaaatgttccaaataggatggaaaatgaactcagaagttcacgatgcctggcaaagcttgatcagaaaccacagagaaaggcctatcacaaccacagtcaaaagtgcttaaaaacaaaacaaacaaacaaacaaacaaaaacaaaactcatgtcaggcctttcaagagctgtacaagccagaagacaatagacacaccctcagaggcctggggaaatgtcagcttagagtctcaaccagtgaaattccttccaaacccaagtcaagatggaaactgttatagacaaagcaaagtggaggctttatgactgacagacttcttgcacctctaaaaatgcttaaagacagcttttcaggttgaaataaaaatgacaccagatagaaatgaagagccacccaaaagaaatgaggtattccagactggatggatttaacgatatttattttcattttaaaatctcttttaaggtaattatctttaaaaaacaataaaataacatcaataacattgtgacatgtctaccttacagtagcacagaggacagagagagcattgtaaggctgtcgtacaatgtacatacagaacctagaatgttaagatgctgtatgaaggtaggtcatgcacaagtaaaagtacagattataaaccctggcacccagacttgcaaactacccactctccactccagagcctagagatggctctacaggaagccatttctccacactagcaaagtattttgacacctattttggcaactaaagttgtattgaaacccagctatacttgtatgtgtagctgtttgatctacttgacatttaatgaccaagttgatttgttagcccagaggtccagcagtctgcaaatccgaaaccacttcctctctcccttcacagaaggctgctgttgacacttttcctactgagcaactgggaacaaggaactttagttgttgatatcaagacaacaaaggagagagacacaacaagaacaaaaatcaagttaggaaaaagtaaagaaaaaacaaagtaaacagaaaacaaataacaagatagaatgtttaactcagcagagccctaattaatccatgagtttatcagattatcagatgtaaaaaaacaaaacaaaaaaacaaaaacaaaaaaacctttccagtgtctctttaaccttctctaatgcaaaagcaagtaatttgtgaatcaaagcacagaaaaggcagctagaggggccatatcaataaccaacaaagtagacgttagaaaaaaggagctacccagcatgcaaagtgagagatttcaaaaccataaagggtattttccaagaagatataagaatccttgttgttcaaatgtctgataacagagcttcaaagtgcttgaatgaaacactctcagaactgaaggaggagtggaaggccatctttatagctgtgtaccccagttctcagtgctggagtatggctagcacctgtcgatgggggacctgaaaaattccagcagtcaccctgacctttccaaaggattccctatcaataagagcagcatacatattcttttcacatgcatatgaagtgttcatcaagagagttgatattctgggccataaaataaatcatagtgaatttaagactaaaatcatacagaatcgagttttctgaatgaacctgacaatgtttctggataaaaaatctctataaaagcatagaaatgtctatatattagccacaggcagttagaaaacaaaacatttaaatgttactatttacagtgtcaccaaagctatgaaatatttaggtatggatagcttgctgaaatggggaagtcttcacgggagcaatcaaagaagagctgaagaaagagtatgacaccatgctcatgggttggaagaattaatgaccttaggtttctacttcttcccaaatcaaggtatagattgaatcctaatctaaatattgtcaagcttttgaaaaattcacaagacttttctagcatctgtatggaaattagagagactctaagttggccaaagaaatctttaagaacaaagctggagcctgatcttatggcatgctctagtgttattggagttgagataatattgatcttaggagttgacataaagatcaatggaatcaaatagggccatctagaaatagacccatgtgcatgccaccaattgattttagaaaaagatgccatgatgattcaatggcatgaggaaactttccagcaaacagcgtggaaacaaccatttgtcagtgtgaaagactagccttacctcagactgtatgttaccttcatccagatcatagacttatttacaatttaaaactataacatttcatggggcaaatactgtatacagcctgtaggcaggcaaagctttctaaggcataggtgctgtcagtgaactccttaaaattcccatacaagtggaggaggctcagaagatgttcagtcaagatgtagtgagttcgaggccagcttgggacatgtgtgatcctatctcaaagaacaaagaggcagaaaacagcacctatcaaagagaccatgaaaagattaaactctatcaaaacttaaatcttttcttcaaaaattagtgtgaaaaaaaatgaaaaaagcatttcccatagggcaaagagtaaggaaggaaggaagtcagttagttcttggtctaaaatatatatatatttggcatgcatacagacaaaactattcaagaatagaatatactaaaggatgggcaaaataactgagtggatcttcattttaaaaaaatggctgtccaacaaaaccctcaacattgttagtaattaaagaaatggtaattaaaaccacagtaacagcactgtgcctaccgggactgctggttgtaaagagaacagatatatcaaatgggagccaccatatggggaaattgaaactctcataaacctcttctaaaactggaagtgataacaccccttagaaagattcttgaggattcttccagtttctgtctgcaccaggagctgttcctgtgccacagcattctatacccaaataccatagcagggagagagcaaatctcccaggagtgctgacaagcctgtgagcacacattagaccaccgcttctgttcagatagacccaccaggagccctcaggacacatgaaccaaggaactgccggggacaggatacttccagtttctgtatgtgccaagagctgatcctgtgactcagcgctccatacccaaataccaccgggggaaagctggtctcccatgagtgccaaaacaactgtgagcacaggtaagaccaccacttctgctcaaattcctgccacaagagggacccacccagagccatcagaacacaggaaccaaggaacagccagggacaggatccttctgatttctgtctgcactccagagctgaccctgtgccacagctctccgtacccaaatacctccctaagacaactgatctcccagaagtactgactcacaggcttgcaggagggacaaggcacagtcagagacagcaagaccagctaacaccgcagataaccagatggcgagaggcaagggcaagaacctaagcaacagaaactaaggctactttgaatcatcagaaaccagttcttctaccactgcaagccctggataccccaatacaccagaaaagcaagactctgatttaaaaccacatctcatgatgatgatagaggactgtaagaaggacataaataactcccttaaagaaatacaggagaatacaggtaaacagctagaagcccttaaagaggaaacacaaaaatcccttaaagaattacaggaaaacacaaccaaacaggtgaaagaattgaacaaaaccacccaggatctaaaaatggaactagaaacaataaagaaatcataaagggagacaaccctggaaatagaaaacctagaaaagagatcaggagtcatagatgcaagcatctccaacagaatgcaagaattagaagagagaatctcaggtgcagaagataccatagaaaacattggcacaacagtcaaagaaaatacaaaatgcaaaaagctcttaacccaaaacatccaggaaatccaggacacaatgagaagaccaaacctaaggataataggtatagaagagagtgaagattcccaacttaaagggacagtaaatatcttcaacaaaattatagaagaaaaattccctaacctaaagaaagagatgcccataaacatacaagaagcctacagaaatccaaatagattgaaccagaaaagaaattccttctgttgtataatagtcaaaacaccaaaggcacaaaacaaaagaaagaatattaaaagcagtaaggggaaaaggtcaagtaacagaggcagacctatcagaattagacttctcaccagagactatgaaagttagaagatcctggggagatgttatacagactctaagagaacacaaatgccagtccaggctactatacccagaaaaactctcaattactatagatagagaaaccaagacattccatgacaaaaccaaatttacacaatatctttccacaaatctagccctacaaaggataatagatggaaaatgctaacacaagaagtgaaactacagcctagaaaaagcaagaaagtaatctttcaacaaacccaaaagaagatagacacacaaacataaaaataacaggaagcaacaattactattccttgaaatttcttaacatcaatggactcaattccccaataaaaagacatagactaacagactgggtatgtaaacaggatccattattttgctgcatacaggaaaggcagtgtcaaagacagacactacctcagagtaaagggctggaaaacaattttccaagcaaatggtcccaagaaacaagctggagtagccattctaatatcgaataaaatcaacattcaaacaaaagttatcaaaaaggataaaaaaggacacttcatactcatcaaaggaaaaaaaaatctaccaagaagaactctcaattctgaacacctatacttccaaatgtaagggaacccacattcataaaagaaactttactcaaagcacacattgaacctcacatgataaaagtgagaaaattcaacaccccattctcatcaatggacagataatagaaacacaaactaaacagagacacattgaaaataacagaaattatggaccgaatggatttatcatatatctatagaacatttcatccttaaaacaaaagaatataccttcttctcagcacctcatggtaccttcttcaaaattgaccgtataattggccacaaagtatgcctcaacagatacaagaagattgaaataatcccatgcatcctatcagatcaccacagactaaggatggtcttcaataggaacaaaaacaacaaaaagcccacacacacatggaagctgaacaacaccacactcaatgataacttggtcaaggaagaaataaagaaattaaagactttttagaattcaatgaaaatgaaggcacaacatacctaaacttgtgggacacaatgaaagcagtgctaagagggaaactcatagctctgagtgcctccaaaaagaaactggagagagcatacactagcagcttatcagcacacctgaaagctctagaacaaaaagaagcaaatatacccaagaggagtagaaggtaggaaataatcaaactcagggctgaaatcaaccaagtagaaacaaaaagaactgtacaatgaatcagcaaaaccaggagctggttctttgagaaaataatcaagatagataaacctttacccagactaaccagaggtcacagagatagcatctaaattaacaaaataagaaatgaaagggagatacaacaacagaaactgaggaaattaaaaaaattatcagatcctactacaaaggcctatactcaataaaactggaaaatcaggatgaaatggacaactttctagacagataccaaacaccaaagttaaatcaggatcagataaaccatctaaacagtcccataacccctaaagaaatagaagcagtcattaaaagtctcccaaccaaaaaaaaaaaaaaaaagcccaggactagatgggtttagtgcaaaattctatcagaccttcaaagaagaccgaataccaatactcttcaaactatttcacaaaatagaaacagaaggaacactaccatgaagtcacacagttacactgcgtattctcccttgaagatggaatagtttctgtctaatcaggaacctgtcacaatttcctttcatagaggacttcttaagagatttttttttttacttctaccatatttaatgttccaaatagatttttaagactggttgagtgcatattacttttagcttcagaagacatcatgtatatttaagaggcatttaactattataaattattttgatgacttaaaacaatgtcaatattgagtttgtttattaaaaaaagaaattaaaaaaaaaaaagaaaagaaagattctttcccccctttccttccagtattataaactagttttctggtacttatccaaggaaaaacatatttctatagaaaaattttattcaaaatagaggaaaaatgaaaatagcttaaaaccacagagcaggtaaattgataaaaccatcatggcatgcttaatttaatattttatttaacaataaaagaaactaataaatgtaacaacttggatgaatctcaaaaaaatatgacaagcaaaataagaatatggtgtggtttatttatatagtctttagaataggaaaatacctatgtagatgaatagcctgcccatcagtagcagccacattcagggaaggaagctgcacaggggtcctagagacagcagactcatctgtcttgacagtggttgtttgttgaatttcctattgttgctgtaactcagctaatttaaacattaagcaggtgtgttttgcatttgtaaaataaactgcagtgaaggtggttgtaagattaaagtagcaaggtagggctagagccaatggtatttctgttagtacaaaaagaaaccctcacattttatttatcaaaaatattaacctacttcctaccaccataaaagaaacatatgaagtaaaacttttagtaaagtatagttgttcatggcaagagcagaagaaaaattataaaagaaaaagatcaattacaatgtctttctttgaatctaattcccactcactaaagtttccatctatgatctgtttttctgtccaatgagttttccattctgagtccatagtgacctgttacttttgtcaaaattcccactaataaaaaagacattaagagagttgcatgtagcccttaatgtggacacacaaggaccaaggggtcttctcttctcaagtcgcttcctttaaagaaaagctggtctggatcaatcctacccctacccctatgggttcttagtaaggagatattttaggcattcaagattgtcacttaagctttggtaaagaagaatatggcgtccccattctggttcacctggcttcggtcagttggatctgtccttttcttctcttggggtcaagttttattaacagcctaggatcttccattgctgcttccttctcctgtctatatctgttcaggcactgaggtacatggtgctattattattattattattattattattatgaggaggaggaggaggaggaggaagaagaagaagagaaggagtgagagagaaatagaacataggatttgagattcttaattaaattttcttgctttactgagaaggaaactgagacctagagaagggaggcttccagcccacaccaccttgaagtggtggctagtttctcttcctgtctcagtctctcttgtagtggcagagacattatgcacctgctttcaatgaccctgctaaaggatggggcgtgagatgactgtgatccacattgcagaaccagcaatgcttgagagccatcttcagtcaccgcctgcagaagttgctttcctaaccctctgggttgaaaattcctgtggcctccacgtttgcagagttcgaagtttttcctttttcctttatttctctgaagctgtgaacttggttttgaggggagagacttttagcattagctatgctgcaggagtttacagtcatttttagaagccgacataataagaaacctgccatagccttgatatgtctccctagtcagagctcaagctagcccttagtagctttgtaaaggtggagatgcggcctattccccgttctgggtcttgttcattgctgggctgttattaaaacaaaggagtatctataaatgccctggagtgacagagttgtgcccaatcaggcccacaatcagaccaccctgtgttttatggacctagtgtcttggtgacccagaggcctgtctaaggggggtgcagaatttctgctttggctgctaattaaactttagaaaccttttctttgttgctgagccaaccattcccacaatctgatcggcccaagttgatgctatttgcaatgggcaaatttatatttactctttaaaaaacgagcaaccattccaaagaataaatatttatttaaaaaaaaaaaaaagcaaaagtaactgtcaaatgggcagaccgtccgaaaatagcgttattcggaaaaccttccaagagacggaaaaaacttgtcatcgtggccagatactactttactcacatttcagaagagaaaatggtgatattaatgcctccccttaggtaactttcagcctctgcacactgcagctctttggcacctgtgactcacgttgttttgcacatacctcaaagagggtgcaggtgggggctgtctgcctgcactggagtgctgtggcacattaaggtgtggaactttgaagccatccatctatttccgaatcaggacgtttcttgtgaactttgtgtgtgtgtcaggaactgtaaactaaaacagatgaacagaatggatgaaaactccctgtcctaacagacccttcagcctcatcagccacaacacccggaagcaagtttcagctctgccactggtggcctggctgagcagctgagcctcgcccattagctttgctttcacaagcatgtaaaggtcttgatgatgcagtaggagagtgcttttgagaagatgggcacagtgacagatgtgaggtccttactacatggctcagactcacaagccatgaccataaatatcactgtcatgaaggtagtagcctctgcccctaggatcctcagagggtccctgcttctggacactttgttggcatgaacagaggggtctgagcagcctctgtctgaggtcctgtcaggtagcagggcaggctggggttccatagcccggttctcagcctttgcttagctttcttttatttagttagcagccacccagaattagcccttgttcaaaaataactactattattatcctgttttgcttacctgggtgacagactaacatttgtttctctcttcctctttcagattgtttagtgtaattctggaacaattaaccaaagaaacagaaggcgggaaccactctagtggcaaatcaggaggctttgatgtcaaagccctccgtgccttccgagtgttaagaccacttcgacttgtatcaggagtgcccagtaagcacattttgcctcctacccctagaagtactgcctttcccccgttgggtgggtcctgggatcaggaaagagtcctctgggggaagttgccctgttccccagtaggggcccagtagcagcaggccttctttgatgctggaatactgaagcttgcaccattcatgtggatctctgattccagagtacaggtggtgtttattgtcatctgcttttcagctgaagagaggctgggtggcagttggagacctgggcttctagcctcctgtttcctgtttagttctgtgctctgatgatatccagtggttttcttccttctcccgagcctgcctcaccttgtagtggtagctgattggaagagggagggctgttgaataggagcaacagggtggctagactttggctctacagctagtgatgacacttttctgagaagggatgtacgtgtcagtttccatatgtcagccagtgcctggccctgcttgcctccagagtctgacctctggtcaagttgactctcacctgggctgggaaggaaggagcttgcttaagaagcctgcctggcctttgcttcgtgagctctgcccttggtaaaactatcttttctggggccgtcagagtgtggacacccttgcgttgtgcttctgaacaggtaggtactcagtactcagagctggagcaaggatggaggaccactgggtacacccactttccacagctcataaagccctcagaacaccgactcttttcctcccagaatgtcctcatgaagttttattaaaccttaggcactcagaacgcaccaaacccctctggaaaagaaaatactacgtttccaaatttaacatttaaaatgtaggaagtggtgttttaagtgtacttatttttccagatggttcatttattttcattgaaaaagatcagcgcaagtcaaaaaccacagaactgtctggaagcaatcaagagaaacagaaatacgttggcagtggctggcgccattaagtgtaacacgatgaaatggggagcttactgagcaaatatgctccttcagattgagttgtcacagcttataatctaatttcaaagtaatcacgacagcctttcccctaaagagcaaatgacaggacacctgactgtggcgtgtgctgcgtgcagacatgtggcacgtgctgcgtgcagacctggagctgcagcttatgcgtgcatgagtggccctggccagtgaaaactcttggaactggcctggccttggcttccttgggctgaggaggtttccaaagaagggttagtactccgtaaaccctgcagaacagctttctgctctttcctcctccaagacacaaggctgtttgagatctgtggtggtcagagagagaaatggcgctctgactgtaagcccatcttttaggtgatcctgtcaaggaacgtgcaggcttggggagaaaggaattgaggcttttgaggcatgctgtttttagctgcagacttggtgatttttttcctccggcacctgaaatcattgaaaatatccaggaatgtttgtctatacttataaagcattgtcttctcattccctgaagattgaggctattctatatgggaatatatatatacatacatacatacatacacacacacacatatatatatatatatatatacacacacaaatatatatatatacatatatttatacatatacagaaatacatatatttctccccaagcctgcacgttccttgacaggatcacctaaaagatgggcttacggtcagagcgccatttctctctgtgaccaccacagatcgatcgatctatatatatatatatatatatatatatatatatatatatatatatatagagagagagagagagagagagagagagagagagagagagagagaatatcactaagggaaaaacaactgcattccaaatcatgtagaattattttttaaaagttactattttttttagtttcgtacacacacacacacacacacacacacacacatacttgtgtgtattcaggagcatgtgtgccatggcacacattgcaaaggttaggaacaacttgcagaagtcattttttccctttcatcatagaagctcccagggatcactcaggtcaggcttagtagaaaacttatttacttgcagagccatctccctagaacagggcagtggtggcacacgcctttcatttcagcactcaggaggcagaagcagaggcaggaagatctctgtgaatttgaggccagcctggtctacagagtgagttctaggacagctagggctatatgataagagtcctgtctagaaaaacaagagcaaaaccaattaatattatttaaaattgtgtgtgtgtgtgtgtgtgtgtgtgtgtgtgtgtgtatgatttgtggactttggtgaatctttggtggcttatattctattacctggtaaaagtttatcagagtctaagagcaccaggcatgggggtttacattcttaaacccagcactctgtaggcagagacaggtggatctctgtgacgttgaagctagactggtctgcagagcaagttccagggcagccagggctatatagcgagaccctgtctcaaacaaaagaaagaacaaaactggaattcatgaccataaaactaggcaagagcatggtagaacgtgtggctagctctcactgtctctcagaggagttcagaaaggccaatgaggaggtcacaacttttgggctctcataactgaaggggagccacacagggtctccttccccctgcatggcaccctttcctgcctccatggcacgcgtgctgagtatgtcccaaggagcatagtgtaatgagagcatgtgtgttcagtttgagatgaaacttgacattctctcataagtttggccaatctgaaatacagtaggtacactaaacatcaatatattcctgagaccagtggtttactgcagtagagtttaactcttaggtgatttggaaaggcccattcatgtctaaaagaagaaaaataaaaaagaaaatatcaaaatagtagccaagaaaccctgtctgtgtatatgggagccagtgctttcccctcacgctcgctgcctgcaacggacaaaaaccatgaaaaatcgtctcatcagtcttgttttcaagagaaaccatttggacatttaaagacacatttaaagaagtctagccacacagaagctgtagggagacagtgtcatgctggccaggaatcttgccaggcctccctgctgcctgccccctgcctcttcccactagtgctcaccaagggaggcatgcccctgtagctgtgggggtttctttcccttctcttggctcatcccagctgctgctttgttttaactctagtatctcagcattgtgtgtcccttctttctctgaataaatgtcgggaaagttaggggaagaaagacaaaggactctgaggccatgagaggtggggatggagcttggtactaaccactgagcctggaagccccggttccagtgcaggctctgggcgccctcctttccttctattctaattcctcactgttctatgtgtctgcacctgccccacggtggctctgagtccctcgtgtctcaagatcacattttagctacaggacacctgcattctaatattacactgagcatccaaacccaaccttcctaagtcactcagccttctgctgcccctgcttgccgcctccatcctagagggaccgcctttagaaacacggagggatttttcttttggggtctgatgggggacagctgtaatttgtccctgaccctgggcaagatcactcaccctttcctaaggtactttcccttcatcccttcttgcagttgaagttgggtcccaggcttctctgaattccagcctctctagagcctcacctcttcccagtcctttgtccatgtttcacaatgattgctgtccacttgctttctctgaggcactttccctaatagactcaggtctgactccagacccaaattcaaacccagaactacatggatgtgaccttctctttgtaggtggcctttgtgactagctgtgatgaggctcaccaccaccccagctcacactgtgcactgcttctgtgatggttctctgcccaggtcttcctgtggtagtctgtctttaggctcagaggaatgggaaactacattcggtcctctgtccttatcctgtactgagacagtgttttcaatcctctttaattttctgttcgctgttgctcagagtgctagcatactacctgagagtaacatggtaaactctcatgttcccttctagactgtaacctctttgagagtgtccctttgtataattcatctttgtattgctcaaggcactaaaccccatgctttgcatgtagtaaatattcaggtgtgttttgttaaatggatacagaaattagtgcatatgtgaatgcatgattttaatgctgtctacacctctctgggtcttggtttttctatctgtctagtgaaggagttggactaaatgatatttaggagtccgtccttagatcatttcctattgagggttagtattaattaacagctttgaaatagctctaaattttattactgtatgtcataaacagagcaagcatcattaggaattatatttatggctcctttgaagtgtcattttaactcacaagtggatttttttttctctcctaggtttacaagttgttctgaactccattataaaagccatggtccccctccttcacatagcccttttggtattatttgtaattatcatctatgctattataggattggaactttttattggaaaaatgcacaaaacatgtttttttgctgactcaggtgagtagtgacagttttgtgctttgttctggaggaggtgttggtcccctgagcccttccctaccatcgatttcctcttcctgtgtgaattatgttgaggatggcttattctgattttccattccgatttcctatgggaaagtatactagccaataagacgggggccctgtacaaggnnnnnnnnnnnnnnnnnnnnnnnnnnnnnnnnnnnnnnnnnnnnnnnnnnnnnnnnnnnnnnnnnnnnnnnnnnnnnnnnnnnnnnnnnnnnnnnnnnnnnnnnnnnnnnnnnnnnnnnnnnnnnnnnnnnnnnnnnnnnnnnnnnnnnnnnnnnnnnnnnnnnnnnnnnnnnnnnnnnnnnnnnnnnnnnnnnnnnnnnnnnnnnnnnnnnnnnnnnnnnnnnnnnnnnnnnnnnnnnnnnnnnnnnnnnnnnnnnnnnnnnnnnnnnnnnnnnnnnnnnnnnnnnnnnnnnnnnnnnnnnnnnnnnnnnnnnnnnnnnnnnnnnnnnnnnnnnnnnnnnnnnnnnnnnnnnnnnnnnnnnnnnnnnnnnnnnnnnnnnnnnnnnnnnnnnnnnnnnnnnnnnnnnnnnnnnnnnnnnnnnnnnnnnnnnnnnnnnnnnnnnnnnnnnnnnnnnnnnnnnnnnnnnnnnnnnnnnnnnnnnnnnnnnnnnnnnnnnnnnnnnnnnnnnnnnnnnnnnnnnnnnnnnnnnnnnnnnnnnnnnnnnnnnnnnnnnnnnnnnnnnnnnnnnnnnnnnnnnnnnnnnnnnnnnnnnnnnnnnnnnnnnnnnnnnnnnnnnnnnnnnnnnnnnnnnnnnnnnnnnnnnnnnnnnnnnnnnnnnnnnnnnnnnnnnnnnnnnnnnnnnnnnnnnnnnnnnnnnnnnnnnnnnnnnnnnnnnnnnnnnnnnnnnnnnnnnnnnnnnnnnnnnnnnnnnnnnnnnnnnnnnnnnnnnnnnnnnnnnnnnnnnnnnnnnnnnnnnnnnnnnnnnnnnnnnnnnnnnnnnnnnnnnnnnnnnnnnnnnnnnnnnnnnnnnnnnnnnnnnnnnnnnnnnnnnnnnnnnnnnnnnnnnnnnnnnnnnnnnnnnnnnnnnnnnnnnnnnnnnnnnnccctcgttttaggcagccaaagagctcagcagagatggcagaaagccaaaaggccagggctggttgagcctccagcacgtggataacgtctggtgactagggtaggattcccttcatccctggcaaagccagacgggtttgctgtaaacaaagtacagcagccacccccctccccatgactttgtttataggtagaatttttttttttaaagcccacagaagtctcgacatcgaatcatttttatcccatagtaggagtttctgggaaatacaactagcatgtagattttgagcccaacttccagtggatcaaaccagtatccttacagagaattatttagcacagtggttctcaccctgtgggtcatgacccctttaggaactcagatgtcttcattatgattcgtaacatgagcaaaattacagttatgaagtagtaatgaaaataactttatagctgggggtcagcacaacatgagggactatgttcaagggtcgcagcattagcaaggttgagagccactggtttaaaggaaaccaatagcagttcttgagtaggcagcttctaggtaaaaggcttagaatggagacagagcttttgatagtttctaaatcctaaaggtgatgtctttggtgggggagttgggtttttttttttttttaatcactctctaccttcagagactgcaccaagccctgggtcttgcttcccttcactggtgaacactatgcttgtgagattgtgcgtgttcctgtccagccggccctccatatctacagaacctgcatccatgggtttaatcaacagttgactgaaccaaatgcagattgaaaataattcacacacacacacacacacacacacaaagtcatctgcattgaacatgtttggacttgttttgtaataattccctaaatgatacagtagaatgatgttaggaatgacaagtagtacagagacgacgtaaagtacatgtggatatgtggatccacgtcatgtgcagatattgcactgcttcatctaagggacctgagcagctttggctgtggctggtccccgcagatactgagggtcggctgcctatcctgataagtgaagaatgagcatcaccaacatgctgtagcttgtttgtccttcatccctatttctgattgttataggatcgtgtgtgatatgtgtggtgtgtgtgtgtgtgtgtgtgtgtgtgtgtgtgtgtgtggtgtttgtgtgatatgtgtgtgtgtggtgtttgtatgnnnnnnnnnnnnnnnnnnnntgtggtgtgtgtggtatgtgtgtgtggggtgtgtgtatgcacgcacgcgcatctgtggacactaatgttaattatagccacaaacaatcccttctcctggagaaggatgggtatcatcaggcatgcagctcccagcttgggtggagtgtccatttcacttgtgtctcctaagtcacagctcctgagccgagcagagcctccatttcagtcccccctcggaatggctgataactagagcatatcgtccacaaaagcccaaactctgcttttccctccctcaaacagtagggcagttttttcttgttttaaaacaagtgaactctgtgacttcctcagctctgtcttctccctatcgtcacggtgaactgccgcactctgatcccacatccttgacggatagacgattccctactttatcttacatttttgcacattgattttctcacaataatcttcctgttgtcgtgcagagacaatttcaggactgtgtggctacagaagagaaaacttcatgcactcagaaagaccagcttccacgtgcttttctgagaatgtttcagtgtcacccatgataatgaaatgctctactgttgccacgaccataacatagttaataatttagcacttgaattacatcctctatgaattgcataacacctctattatgatggagggtgcatgtaattcctcaacattacgctagtctctagtctctatcccttcatagatctgagatttgagatggagacagggatgtatgaagatgctgtgagcatcctcggggccctccagcaagtgtctctcgtccttgattggaggcaggcatatgtgaactttttaatgaagcttaacagtaaatgtgtttggccttgcagggatgtgatccccattccagccatcagttctgctcttgagcctggagccagccatggaggaagtgtaactggatgcttatggctctgtcttggctggatttcctttatggatcctgaactctgaattccctatggctttcatacatcataaagtgcttgcctttttaccttctcccaccccacaaccacctaaaaacatgaagcccatttttagcttttgagaatcatgtaaaagaaaaacagattgttcttcaaggtagctgagggactgctgtcatagacagtctcctaattattctctgacctgccagtagttaatggatccttgtacaacactagggggcagctgggcaacgccttccagagtgttctctaagaccttatggtatgaagcacgttgggatgggttttaatcaccgttgactacatttattagctcatcatagaaccaggcaggagccaaggagctaagctcttccagtattttatgggccacagtcagctggaagccactgtgctctaggacagaacatctcggcccagcacagagcctggcctggagcaggcgctcaacagatactcaccactagtgtccctcttcaacctgaccgagccttttgcctcgtcggtgtggataggctgtgtcagaggattttgatccactctcctgggacagaaaggagattcagttgtaaatatcaattgcaaacaaatttctcagtgtttaggtttttgtatacggtagacaaagtctttgcctctagacaagtttatatttagccagcattctcccaaaatgcctaggctgtaattctcaagtctctctggcaaatgtctggcagggtcttggaaagggatgtgcacaaaggcgcacctggagccgagctatttggagacgtggcaagttgggatcatgggcttggtggggaaatgtattgcagatttttcatcaagtgagcttcccaaacacatttaaagtgatgtttgcctcacacggatgccttgcccatggagatggcagtgctgtgcagagaaagagctggacaaggcaggttcttgggtcccctgggccttcatgcccttggctacaatatgcacagttagagggtcttttttccttcaacttagagggttttgtttgtttgtttgcttgtttgttttagaggagatgttttgaatgtaggaagttaatggcaaagggttggttttaggagagtgctgtttatctgagtggcaccctgtgttagcacccaactttttcttcagatgtacacagggctatgagcgtgcaggccgaccttagtctgaagtacttgtcatcacctgacagctcctctcagtcaaagcacctgggagggacattcttctgtgcccccacagccaaggctttccttccccacgggccatgctctgaggcactctagcagtttcccagggttaggaaagcaaaaggccttatgctttcccttgacctgagacatacatgggcacttagtcccttaaaataagagaaaattgaagtaacctaaattgtcttgggtgccaagtggccctctatgatgagacttaaaaaaaaaaaaagaatctaaatcgaaatgctttctctcgggctggtgcctccatcgttgtgaagagcatgcacacaaagccctgggcagagaatgtatgtttgatgtgggtatggggatcagcctagtaactgtgaggatgacctatgtgtatgcatagctttaaggactcagccttctgcttgctgtgcagggagaaagactggccctgagcacttaagttgcatctcttcgggcaaagagaagagatgctccagccagttgtgcttagctcccgcctcccctcagtcctctccagctgcccttctgggtggcagtgatttgagaatgtgcaagtccacagagcaccccgtcctaagaaattcaaataagatgttccctctgcagtggaacatacagctcttatcagagccctactctgaaacttgccaaggcctgagaagggcagatgagacagatggccaagccagcagactttgccagtctcaagagtaaggtgtctaatgggagccccgcactagggcactctctcctctgccacgtatacacccggctccagtggaggttagacatctctgtcacaggtattgatttaaggccaccgctctggccaccacaccaagcagcctgtttcttccctacatgtggattttgagatgggtttggcagtgtcgctgctctggaagactcgccctctgccttcctgctgaaattggcttatccaacttaattagatcaaccattggagctgtggccccggctcattcattcctccaattgctgatgtgaagatggagagggttctgttaagcacgtcagttttcatgtggccaaacaggtgttccgtaagggaggcaatgccctctggagagttcagcaacagatgttaggtctttttgtgtgtgtgtgtgtgtgtgttcccttttcctgtttggcttcagcatgaggcaaatattgtgaaatgcatgagcctttctgtaaagctaaaagctggaagcagaaaacgtgcaaaaaggcacagggcttaaaaccctgagggtttgcacctgctagacaagagcgatgggcttaccctgcagacccttgtctaactgaaaatccaggctactcctgcagaggagagaattttcctggagaagatctatgctgttacctggttggtccttaacacccccttcctccttaaggaagtgtttaatattcagttcatcccactgaacgctgacctgggctactggaaagtcccatccagctacgatccataaagcacttgtgtgcaggctgctcactcccagccattccccagggaagtctgacgaggacaccatgtctgaatgagcagttgagtcaggtgctcctctggctcggtcctgcttttttgaacagcttccaggtcagagttggagttcttttaatgggtacagctgagacaaacaaacaaacaaaacaacaattcccaatgttatccctgagcacatgtcagctagtggccttgggaacattttcttgcttttttagttgtactaagtattcattcatttattccatttttatctagtttgctggctgcagataatccaaacctacagaaggctaggctcccttgggtagatagttaggatgattatctccaaacagatggtgattattttagatttatttattttgagagtgagtctcactgtgtacctggctggcctgaattcggtgtagactaggctagccatgctggatcaaaggtgtgtgccaccatgtcaagctagtttttttggctttgttttgaagagcttatagagtcaaatgttgtaggttaggacttttccaccaagttttaaaaagcagttaggactgactgggacagagcatcagctcagaatcagagaagcaactggctccatcttctactgaggcttgccctggaaactgctcaccagtacagtggcctgagccagagccagatctcctttccctacctgggaccaggatttgctgtttggcctgaagcctctatgagtcttagtgtgtgtatgtgcaggcatgcttgtgtgcttgtgtgtatgtgtgtgcaggcatgcttgtatgactctgtgtgtgtgtgcctgtgtgtgtttggaatgcgtaatgaatgtctgctggctgctcttgtctccatctaagtaaatgtttaatccaatgtatagactgttctctctaatgtgaccctctcctcactggattcccctattaacccactcctatgagcccatcttatttcttacagatgaatgatgctatgggatttgaattgccctgggtgtattttgtcagtctcgtcatctttgggtcatttttcgtactaaatcttgtacttggtgtattgagcgggtaagctacatctctttcatcttgaaggcagagtcctgagatcagttgccaagaccacgcaggcttagagggaccggtgggtgggtaccagttccttcgtattgctttctcttctgctgaggcttccggaaccaagctgtttcctggaacctcaccagctactatgaaagaaagccactgagagattattgaccaggaattaattaatcagtattgttgcttgggatttaaatttcccttgcttggccttttgtctgtcctaaaatgagatacatttataattgctttcttggtctaaatccaaatacaatgctcattaattggcacaaaactgctgctaaatgagtggtctggactgactttggagagtctcttcctgaagatttcagcatcagggtttgccccgcctagaggaaaactgagcaagggtacaagctcattcaagccctttccttggagcgctgccctccacccaaagctctgcgtggtcctgcagctgcatccggggctctgttctttagtaaatggataactgataactgatctccttaccttttacaggttaatgatgcgataggatgggaatggccatgggtgtattttgttagtctgatcatccttggctcatttttcgtccttaacctggttcttggtgtccttagtgggtaagcagttggatccccgttgcacattattctcctgataccacatgggaggcagccctgcgtgtctctcagctgctccctggtggcctctctgcatgcctttggactctgatgtcccctctgtgtgttgcttttagattgaattgtgattctttctggctgtatctgtctgtgagattccgtgtttctgatgcttgccacgcactgttaacttaatgaaaatgtttcccttagaggtgaattacaagcaaataaaaggcttcctagcttaggtctcctccaggaagggagtttggtctcttgtgggttttattccattagtacatgacctggccctcattagtcactctcagagcattataaatagtggtgtttcagattttgtggtgaagcctagattggtacatgaatacccagcagtttcaagccctgccttcctgaggttgggatactgtattagcctggcttgtcactgtgtgagctatgcttccgattccacgttcagcttttccacacatgttctctatggccttattattccatcatttggtcaccagtttgaaaattcatcttgtttaatgcctatttctgggtataccctccgtctatcaggttcaggagagatgggattgggaagggccttgggccttgggctgtgccctacagtgatgggagatggtattctaaagcccgtgtgttgtgagcagatgtgaatctcagaacctctggcgtgctgcagaaagtggaggatccccatcagagtaggctggggctctctcaaaagcacttccataaatgggggcttaaacctgaaaaacactgtgggtctctcatcattagtctgtgatgttgtcttataactaggataaaatatttagttaaaaattgtattctattttaaatgaggttactaaaatgtcttgtcttaagaattcaatatgtaatgtttataatcggtacaattttaaaaattatggaataataatatagtcaacttttaactcaaaactaaagcaacacaacacatacacacagtcagtaccagcatacagtcactgctctgaatagcccagaagacacccatgcgccctcactttggccctagtcaccgcactgagactagacactcaggatatcacactgatggacttggtcccaagggaacttatcagctcactcgatttatcttgctctttccgaggttgtatctcagggacacgatgtcttcatgtatcctgggtcagtaaagtgagcttcatctcattttgtggagacgctgtcttttgcagagcagaatgcagagcctagccatccaccgtgagccccctgttcgccttcctccaaacctgccttgctgtgaattgagtgcagtcagccgtattccatgggacacacagtcatgaaagacccttatctagaagtggcccaggagcagtgcctgcctccctccctccagtgagagaagcagggagtgggcctctgtggcctgaatttagggtcaggatggttagagtggcagttatagttggagaaacttggccacaggaactacccatacaaggccagcacccgcaactgtgttgtgagttccttggcgccccatgtctccttaacccaactaaactgacggaggccatggaaaccactaattttaacagtgccagtgacgtgccttatcaccagttccccctccctgggcaggaactgttgcctccggcatgatgaagcagagatataagccagccaaatcctgaggcatttaaaaaagcagaagatgggggcagaagttcattataatgacagggcctcaatgtgaaacctaggaggaggacccctaagccagagggttaaaaaagcacagattctcacctagcagtttactgaaatatatcttgagaggaaataacgagtttttgaaaggcatttatttttacatcaaaagaaaactatgaaggagaaaccaaatggtacctgaatgttaaaaaagcaaacctaggacttgctggtgattttaactgtcagctcatgctgggccctgactcctcagaggtgcacactcctctcctccctcccacccccaagccacactggtaagaaatgctaaggcaggctccgggtagagtcagagctggatctgcaaaggtcttcgaccatgattctcccagttcctgatgaaggcttggctctgggccagaggccagggatgccaaggtggctaaggcacagactctaggctcaggcccaggttacagctggagctatacagccagtgcacagcgagtagagttgggggctctcaagggagactgcctgggcctgcagggcatgctctgcctctcagggttccctgcacctctcccactgcctgggtccttgtgcctccattcacagtttttgctgttattattaaagcaaacttaaaatcattactgtaatcttaagttcttcacaatattcatttttagagaacattagagatgttctaaatctaggacacaaagtgtcagaagacatttctgtggcatagcccttaagggactttcagactaacaggtacggtctccaagcatcctatcgtagggacttcagccaaaaccttgtgcattattaccttcaaatgaggactcactcagaaacagtgactgagacttgtgtctgagactgagcccttttcttatctctctctctctctctctgtgtgtgtgtgtgtgtgtgtgtgtgtgtgtgtgtgtgtgatagcctctcgctgctcagtctaacctgacatcaggacggtagctatcttcctgtcttagcctcaagagtgctagggtgatgaacatacaccactgtgtctggatgttaaccctttttaaacattggcttacacttcttcatttaagtatggctgtggcatcctgttgtattgtaatctacacagttattttggccttcgcacatttttaaggcatttgcaggctgagtctctgaaaatgctgtctgttttgttttgtttcctcctcaaggtgagactgaagctcatgaattgcatgctctgtgagcatgggtgtagatgacagcacctctgctcacggcgctctgtgggaagagctgcgacagacagctggtagctggtgctatggtttaacatttgattgtccttgctgatccctggtgatcctatgatggacaaagagctaaaaagactgcttcctttaggtctgaggtctaggtagctgatgcatgtcttgtcttctcatttgggtgttttaaaaatgtgggagccgttcgtttttaaagctgctcttttaaatcctggcactctcaaggtttgcctctgtgtataggcacataggagagcagtgcttatgtgtgttactatagggttctccaggggacagtagtcctcacgggtgggaacctgattctctacttcaggacccacctgccatctgccgcagctctgtgatgctgaggtttgagtggtcaagggagacctcccgggctcctgaagtcccaaggacgccctgacctggcccttccagcatcccaagttcacagtggtctcagtaatgctcatctttagtctcttcttccctaaacagatataaccttgtcttgttcccagcctcacagggtggcttgaaatcagccagtgaatgtagagctacgtggagaactattctaaggcattttgtcatctagtacattctctttttttggtttttcgagacagggtttctctgtgtagccctggctgtactggaactcactttgtagaccaggctgacctctaactcagaaatcctcctgcctctgcctccggagtgctgggattaaaggcgtgcaccaccaccacccagccatctagtacattcttaccttcaacctacagaccacactctactctcagccctccctggtgaagcgggacagtccatgggggctctgtggaaatctcaagaggagaaatttctgcatattttaggaagcaacttaagcagacatttgttatgcatacatacactatgcttgatgccaccaggagatggccatgggacatattgttctttgtcagttgtggaatattttgtctgtagactaaaatcattgcttttgcgttagacatagtgagggctctcttctcttttgtgacagtggcagggcgtgacgctcaagcatggcagctcaaacaaccgcagtgtgaatctgctctgcctttaccatctgtgtgactgggccaaggccacctctttgagatgactttcctcaggggtgtgtctgcctgtggaacctcatggagtccggggagccttcagagagctacagaatgtagacccttaagggagactgtcagaaaggttctagggagaatagatcagtgatctggaacaaagcagactggcctttctaagccagtgaatagcaattggccaagataggtttagactagtgagaaatcaaagctctacaatatgttgaaatggcttattatgtaagcatgtgaataatagaagccagttgtgtctaaaatgcattgctacatgggctccctcctgggcctgcttgatggaatagggtaaagtcatttgacattggtctgggaacgcaaggcttttgctaacatcttccaaaaaaatatttaaaatagctcgtctgaagcgagctttgtctgtttccaggcaataaacgttcttcataagccccctttcaggacataaaaccaaatgtaaactgagccaatgtgtctgtggtttcaaaaccagtcggctctgaattaattttgtgtttatgtgtctgtgcgtcctggtaagcctcaaatctaccaagtcacaaacttcttttaaactcactcactgagttttctactcttacgggcctgtattagtttcgtctcggtttgctgtgacaaaatacatggtagaggcgccattaacgaggaaagtttgcctaggctcgtggttttaggggatacagtccgtggtgatggggaaggtttgtcagtgaccatgaggcactctcattgcaactgtgtcaggaagcagaaagattcgaacgctgcactcagcttgcctttcccttttgtacccagtctgtgacccgagctcacacacagggtggcgtgaccttcattcaggatggatcttttctcctcagttaaacttttctgggaaaactgtcacagagttatgcctttggagcaatccaagtccagtcaagttgacaatggagattgaccatcaaccgggcccctttatcttaacttgaagagtttgggggcaaacagggtaaagcaaagcattgtattaaaaaaaaaaaaaaagcagaggcaattttcaaaacaatttgtctttctgaaacttacttcctagactccattctgaagacataaaacaccagacccagacagagatgaagcatggctgcttttgtgaagcctcagcttccgaaataaagatggatggttacagagaaagtggggcgggaaggtggtaacgtccctggagagacttaagaccacactttgtcagaattttgcagaatagagtcaggcttacagcatggggagtcggtccttggtccagttatagtcatggcattatgagctaggaaatctctgctgccttcttggatactggtttatggggcaaaacaccacattttcgggtattttctaagtgaagacatatgccatgggaatagtcattctacatgtttcatgatagtttaaatcttactaccaaaacctattgataaatagtgaacagcaggatttctacattcctgtatctacacctctgacatatctgcatcatagaaaagcagtcagtttgcagagttaagagggatagcacccaggtcctgagctgccatcagcccatcttggaaaacagaaatataatgtgctgaggtaatgagaacccatggcttgaacaacaaaacccttttggcaaatggaagtctagccttttccaggaatggtagcttacacctttaatatcagcactcaggaggcagaggtaggcagatctccgtaagggttcaagaccaacttggtctacgtagtgtgttaacatggcaaacagggctacatagagagagcttgcctgagagaagaggatggtggagagctccttacagaaccctcttacacttaggtgttttcttctgtatggaattactctctgagctcccagaatctcagagacacctctgagggtcactttaagcaaaagactccaaaatattgcataatttcactcgagttgaatgaggctgtctggaaagcctgtcctcataactgggtgtccttcttggactttggggtcatgttatgagtggaattgatgctgaggttggggtactgaaaagagccacagtcctctagggatgctctttggtttagctttggtaaagtatgaaattaagccccaatctgactttaaagagaaaaatacccaatttctcttttctaataaagaaccaagctaaacatgcatatatatctactctggacattaagctttcttgttgcgtagctgacagagaaaccccaagagctgcacgtaccaaagtcccagaagtgcgcaggctggtagccacacctgacatcaacaagtaagcgtgacctctctgctgctggctggcagctgctgtttccatagaaatggctgttggatcagtggaaacgaggtaagagaaagttttcgctgatgcttgttccttcaagctgacgcttgtttccttggcaacagcagtggacagcagccaggctctagaaacagattcagtagagcactcacttgtcagctgtggctatcatctgctcctgaccacactgtctttgatagcactgagcagaggcctctgaggacctggcaggctccgctggcctcatgtgccctcctgggcatccatcttgcccgtggcaaactgtgtccaaagcagaccgtcagcaatctcctccccacctgtgctcatcttgttacgcagctcagaaggcagaaggttgtcgagggcaatgatactgcagaggcgaccgtggagtgtgttggtctcaagtcctaggggagtagaattcattacagtgattttatgcacagactcagctcttctcaaagctggtgataccttaatagttgaaattaaagccataattttcatgcgttcctcatcctgctggtggccatcactgttgcctacaatgaaaagaatgtttatgagtttaataactcgacttcttgtaagaaacatattaatgacagtctctaagatgttactgccatcttctgccagatcctttccttctgctcagtgttcttatataggctagtaagattgcttccatgcctcaggtatcggctctgtagggcagcttggtatctatacaaagatagcatgtctaccatatgtgcaacttcttgttacagttcagtacctgcttcttcttggggttttgattttatttcggcaccttgcccgtgtgagacagcgtgcgtagggcccagcacacaaggcagaacgttgagagggtctgggtaagttatttgccctaaacgcctcaaagacacattttcgttaagaggattctttttctgaagaagaagggggttgggaggagggaagccatgcaaatcatagctgtctctttgagaaacagctgagatatgaacctgcggtgctggcagaatgtgggtttgggcatccagatgaactatgggaagctatgtactgtctcccttttctttagttttctggaacacggtgactttgtctggaggcagtgctgagcgactgactgacccgtaaaaagtctgtgccatctagttaggttcaaacaacagacaagacaaagtagtgtcttattcgactcctcttaattctctccccttctctcctatttaaaaaagaatggcttttcctttatctgatgagtaatgtttgagtgcccacacagaggagctgtatttacccagtgccacactagccaccgtggttactgtaacgagttcagagcagagacctgggcatggtaacatgggcctgcaattctagcacagggacataggcatgggagtcatgagttcaagaccaccctgagctatgtagaaaggtgatttttttttgtcattatgaaacatgcttaatcaagaaggtaaacttatggtgaaaaacctttacaaatgctctgagaataggagaggccatgtggtggcacagctatggtggaggtgtgtggcagtgtcccggggcactgaaggctgaagaaacatctgccatagacaggcatagtgcagagacagaaggcactgagcttctatcagggccggaccatgggaagaagcagaagacattggagaaactaaacaaagctgggaaggcagagactgaggacctgagggctctgggaggcagggacaaagggggagaactggctaacagagctgagatctcctgggtccttgtagagcctgtggtaagctttgatcatggctgaagagtagagaaatcacacacacacacacaaaaaaaaaaaggtcaagaattggtgtgatttaaaatttaattttataaaaattataatattcacatgtcttcagattacctttaaaaatgttccaggagtgagattgtattgttagtcatctagagagatgcatagagagatgataatggagatttagcagatgttatttgtggaatccagctggtaggcatattggtggcattcattctataatccattatgcttttatgagtatttgaattttctcttagtttaatgctggaaaatctgtatataaaagtcaccgtagctgcagtgatttgagtggacttagtataaagggagtatatagaaagccaacctaaggctgctgtgagtaccaatggtaccagcttggatatttcactataaagaagtatgaaatagcacgaaaaaaaacaatgtgactgttttcagaatatggacgtgggcttcgcagtgttgggactcatagctccagaagttcctgttttattgcctggaaatgctcttagaattgttgtggagggcagcaaaaactcagcagagaatgtcagtccatttgtgggggactcaaagagtggttcagggatgataagacatctgtagggcagaatggaggggagacatcgtcagagaaagggctccagaaatctaaataaagaaatctaaatctgacatcttgggccatgtgcatagctaattacatgctgtatcatactcaccaaagcctggcagaaaacagctactggagagcccagtgctgggctcagactgtagtgggtaagccttaaagactgtgtgtgggatttgaagtgagactttaggaaaggtaggcattagcaggaagccacattcactataaaaacaaactcccaaaggatcagaccaaatgcctaatacattagacttccaaaacaaaaaaacaatactcattaatgccaaagtgcagccattggcccaaatatttcatctcatgatcaaaacactgagaaaaggagcaatgaaacagcctcagtgggtggggacgcacgtcaagaggtgacaggagcgttgtactaggtgatcgggcttgaactgctttaacgctgttcaagaaattaaaggaaaggatttgcacagcacaaagagaagatagaaagctagtgtgtattaccatgggagtaaggccgtgtccaaaaactggttggaaagcaaaggggagaagttgagtgaaggtttacagatatacaggttagtaaaaggcaagctaatgaatgtaaagttggagtcacagagaaaaatagatgaggaaggaaaaaaaataaataaatgcaaataaataaaacaagtttaataaatggaagaaaaaaccacaatcctaggtgcatcaaaggcagatagccaaaagttaaggataatatgttaaaggaaattaaatggggagaattgaccccaatgatgtcctttggcctccacactcatgtatacacacaaccaacatacacacacacatacttaggtgggtgaagtacaatacattctacaatacgatagaattcattggcttggattttggacatagtaaaaagaagccacagtccaatggactctgatttttttgaagaactgaaagaatttgggggcatagctcagcactagagtgtttgcctgatataagaaaggcccaaggttcaaaccccagttctgaaaaagatgaggaaaaatggttaaggagctgaaggaaactctctggagcacaaatatctcctcaaaaaggtgaaatgacataggacagcagtgcatgcctttaatcccagcactctggaagcagaggcaggtgaatctctgtgggttcaaggccagcctggtctacacagtgaattccaggacagcctgggctacacagagaaaccctgtctcaaaacaaaacaaaataaaacaaaaacaaaattttaaaaatctgggtttttttttttttaaagttaagtgacacaaagaagatttcaaataaaagccaagaaaattgatcaacaaatctacactataagaaatggtaaacgaaactcttcatgctaaaagaaaaataattttaggtagaaacaaatacatattttagaaataagcaccaaaaaaaccccacaaatgtaaagatcgaggtgctccccccacacttctaaatttcttgaaatgatgtcatttaatttaaaaagtagtgtcaagcttccacagagagtgtcatgggcttatagggacccacagcagggacagggaaggttgggatggactaaggggagccttcctgttgtaaagtccttaaaataggtttgccatgctaatgtaaggatgcatgacaaccttaatattttaaaaatgaaacacaataatgccacaaaccataaagagattaaacaggatcagtgccccagaataagtcaggagagcaggaagggcagatgaagcacgtgcagtatagaaaaataaatatataaagcgcacagcacttggtgtggtggctcatgcttgatgttctgacattggaaggctgaggcaagcagattataagttcaaggccagcctgagctatatagtaagaattcaacgcaagaaaaacaatagaacaggtaaaatagcaagatggcagacagctgtaagcttcatcaaggactgaattcactgaaagtgactgtgccagtttaattaggcagaaattgttatactggataaaaatgcaaggtgacataaaatttgacacagactccaaacgaaggaacatggttaatattaaatgtcacccccccccccaaaatggacttcaagaagcagttttagaaatagggtagagagaggtggggcagagaggcacatgcagagaggagaggcaaatggaagcagagagagagagagagagagagagagagagagagagagagagagagagagatcctgcagtaaccagggctatttcatcaagatgcagcgactctgcatgcttgttgctagtaacagatacaatgtgcttaaagccagacctgtccaaattaagtaaaacactggtgagcccacacacgtagatggaaatgtttgtgatgtcttgtcagtaattgacagagtaaggagattaagaaaaaacagcaagtatccagagtatagctaggttaatagctatcaaataactgcctgattgactttatcagaacaccgtgtactgttcttttcaagagcaaacagaacagccacatcatgactattaaaaaaaaaatcattgagtctcaaagcagagctggagggatggctctgtggttaagagtattgggtgctcttccggaggacctgggttcaattcccagcatgatagctcataactgtctgcaccccagttccaggggatctaacaccctcttccgatctccatggcaccagtaatgcatatggtgctcagacatgcatgtaggcaaaacactcatacatgtaaagtaagatttaaaacaactctgaaggtggactctctgtggtggtttgaataggtttggcccctatagactcatgggtttgaatgcttggcccacagggaatgccactattaggaattaaagtcctgttggaataagtgtggccttgttggaggaagtctgtcactgtggggtgggcttcttattgctcaagctctgcctagtatggaggcagcctacagaagacagtctcctcctggctgccttgggatcaagatgtagaactcttggttcctccagcactattttggtctgtatgcttccatgtttcctatcatgatgacaatggactaaacctctgaaactgtaacccagccccaattaaatgttgtcctttataagtgttgtcttggtcatggggtctcttcacagcaacaaaaccccaactaagacactctttaaaagcatgcttttttctagagtctgaagatgacatagcaggcacttgtcaccaagactgacaacctgagttggatccccaggactcctatagtgaaaagagagaactgacatcgatcgacaagttgtcctctgacctccacatgcccacagtgggatacactctaacataaacagcaaacagatggaatttttagaaattaaaaacaaacaataatgaaaaggtatgcttttctagcttttacgactttaagagagaaatcaatgataacctatttataaaatctcttaaatattttgtaattaataaatctctatgatgactcaaaccaccacaagcatttaaaagtactttgaatgatactgagtccagtgtctctgcatttatacagtccatctaaggcagtgttttgggggaagcttgctgttgcatccataaggaagtgtttatgtgactcccagtaagttcagaaagctccacagaccatttttttctggatgcattgttaattcttaacaaatgagagctgctcaaggactttcacaatctggcaaccgtgctctactgcagtgggttctcaacctgtgggttgctacccattgagggtctcatagcaaatatcctgcatgtcagatatttacattacaattcataacagcagaaaatttacattatgaagtagcaatgaaataattttctctttgggggggggtcagcacaacatgagaaactgtattaaagcagcattaaggaggttgagaaccattgctctacagcaacctatagctgacatcatggttaatgtttgaagactaatgactcttcctaagactagtagcaagctgtagatacatctatcagttcatttattcaacattgaattgataatactaagcagtgcattaaggcaaaaaagagataaaatacagaaaggctgagaagaaagaaaaaaatgtatttgtattgatagtcagcatgcttgcttatatggactaaataaagaggctaaaaccttattggaattaaaaccagcatagagcaaggacaggacaccatgtcagacatgtgagttaattttattcctatctaaaaaaaaaaaaaaaaaaaaaaaaactataggaactgtccaaagggttgagcagcaggcatcaaggcatgtttgtggtcccctaaaaatagactgaaggttcaggagaggttgccacactggggcagcatcccagagggctccgaaagggccatagagttgaagagaagacagagttggtgccaaagcaagctcagagggaacagagatgatggggcatatggggagcaggaagcaagggcagagaaagtgaggaggccatgtgataggtgtgggtctaagaagctcctgtctcagcacatacaacccggaatgctggctctctgcactgaattctccacacccctcatctggtttatgatttctacgctggtctggggtgcaggggtgtgtttgtcagcttctcctattgtatggggtgggcaggacatcagaagtcaaaagtcctgactccactccatcccacactttccagagatgtgacttgggccatcacagttcactactctgtacctaggttctttcgtccttgaaatgagacaacctcatatcctgcatgttctgagaacaaaagagattaacggaagggacttgaaagcctcaacgccctgtccacatgtgagggtgtcatgtgtgtctgactgtgctcttccaggagaggaaaaccattatccagggtctgagctgttgcgcaacacggtcagattcttctcaacaactttattgcaggaacacctcaatgctacgggaaccctgggaacccagggaggactccttatatacaccccagcacagggaaaagctttgtgtcctcctgggattggtcagtctgccagcaccttaatttgcatgcacctgatagggaggggttggcgccagatttgttgtttacagccacggtgtaccagaaaccggcaccatcttttaggcataggctgcctacactgaaccttcacttgctagtgtttctctgcagggttccatgactcaaggataaaatattaattcactcagaactccatcattccttttgttgtacaaactttttaatcttaatccaggctttctaccctgcctttgaccatttacttcgtggataaaagacacacacagccttcatatttacaacaagccttgatcagcacaggatctgggtagatatctaccctctatgctattataatctgcttttctatagataactctcagttattcctactatgtctcatctgggctgctcctaactcatggcatctcccttctcctcaccttcttctcttactcatggttctcactcaaccccccccccccaggcctgggatccctaaaatccacctatgtctcttctatccagctattggctgtcagcatctttatttatcaatcagaaataacttgggggcaaggtcacatagcatcacttacgtctatgtgcagactcatctctggggcaaccaggtcttgagggcctgcacttagcattgcagtatacaataagagaccaaaccttagcacctttaaagttctgcttcaaaatcaatcttggtttaagttgtctactggcatcttctgagtctgcaagcatttggggctttcaagtccttgagccttggggacttttgcatcatctataggactttaaagtagtgggaggcaaaccccacctgtctgtcacctttttcccagaagggctcccgtcaggaatttttaactgcttattcataatttttacttatgaacagactagcagacataccagagaattagggctgcaccttatctcttattggcaatgattcaacatcagatttgtgcctaagagggtgatgggaaactaggctctgactgagtgttgatatatggacagagttcataaggatggtaaagaaaggaaagtgttgtctagctcctcgggcctgtcagagagctagagtgtgaggatgagacttcgggggagctccaagcttgctgcacagtagtggtgcaggagagtgaatgtgcagtgggggccctgctgaagacgcacaatctctcctctgagctgtggatactgtacaagtatttaatggttctgaactccatctgaactataaaactgagacagggtgaggagaaccctggagcaggcaatggttttaggagtggctatggagatgaaggtacagacttgggacatcctgcggccagtgcctctctgatgagaaatgagatctgtgtggttcagtcctcaagctggggtggagctatgtgaggccaggcatagacctgttgctcatatccttgttatatggcaaccgggattagacccagccaccaggctgtattcttcattccatttgttgttccattggatcctctgtgatcctttggtacaataagaggtctttgcctctgttttatagatgattaaggctcaaaagattcatatagataaatcaagacccagagagatccctcagtttccttaaagtgacacagcttgaagaggcaacactcataattaaatagaaactgtgattccagagcccaagctgctctctcactggccagaagctctctctgtgcctaaccagaggtattcctgtggctcagccggtacctcctaagaagcttggttcttcatgctctgtcaggctgagtctcttcccaagtctaattacccaaagcagagtgaatagcagattgtcttctaagaacttgggcccgccaccatgtgcttcgtaagtctactgtgaacaagtccctgtggctcttattcttttaaggactgctaactggggagcacatctcagctccttctcctctgtaatacaatacccttgcctatattttcttaccattatgcttttcattgggggactcctcctgagaggggtgcctggctcctttgatgtagcttaccagatggtttgccatttacacaaacatggtaggatttgagttggagttcctagctatttccctaggaatgtgtagatgggttagctagctatttccttaggaaaatgcggatggctgtaggaacgtgcggatggatgggttaagccccccttgggtctttgctgctcatctatattcggatgccttctaccccctgcctccccacccccgtgttgcttatctggctattagtctgtggcaggcagtccaactgggcctttcatacaatatcctgttttggtttataaaaaagatgtgccctgagaccacgagtacctttagatgtgtttatatgttacagaactgccacctgcccatgtcactcttcaggcacacacaacaaacaaaaactacccgacaagtctattgaggtatatatttttaatttaattaatttatttattcactttacatcctgatcacactcccccctctgcacagtcccaacctcacaggtttctccccctactccctcccttctcacagaaggggaagtaccacttgggtaccaccctaccctgggacatcagttgcagcaggactaagcacatcctttcccactgaggcccaaccaggcaatccagttaggaaaaggggatcttatagcaggtaacaannnnnnnnnnnnnnnnnnnncatatgaagactaagctgtacatttgctacaaatgtggctctttggttggtggctcaggctcttgaaagcccatgggcccaggttagttgacactgtagatagtctctctggctccctcaattctatccccctccccttccacaagactcttcaaacagcacttgatgtttggctgtgggtctctgcatccgtttccattcactgctgaatgaagcctgtcagcagacagttatgctaggctcctgtctgcaagcatagcagagtatcgttaatggtgacagagattagctttcttacatggggtgggtctcaggttgggcaagtcattggttgacctctccctcagtctctgctccatctttaggcaggacatcttgtaggcaggacaaattttgagttgaaggttttgttggtggatcaatgtctccctcccgccattggaaatctcacctggctataggaggtggccactttagtctccatatccccactgataggagtctcagctacagtcaccctgctagactccctagaacctcccccatcccaggtcttcagcttctcccagagatgcccccataaattgctgttctcgctcccagcctctcccacccagctccctccctccctccccccacctccaatgactattttgtttcctcctctgagtgagattcacgcgtcctcccttgagaactcctcattccttggtttcttcgggtctgtggattgtagcatggttatactgtacttataagtgagcacataccgtgtgtgtctgtctgggtttggcttacattgtaagtagaagtatttaaaggattcataaaatacgtggtgatactagtttgactcatctggtcatgtgatggctttcattcaaagaaagctacgtccaacggggagcttgtgttgttgaagagtgtttaaaaacacctcttaaacttgcctttgaaagtctttagcttttaccttcacacagagactctacagagactcttaggagctctctagaaaaaaataccaaacaatttccccagctttggggtgactttggtagctatggagaccaaccctttgaagagagagaagtccttccatcgtcaaagaaggaaatgcagtaaatgcgtttcatgatttgttctaagatgtctgcgatactttgctgctgtgcctatatattttaaacttaactagaaatcttacttcaaatttttaatgatgttgtggggtgtagtttcaagtggtggaaagttccatggacacttgtgaccagatcatccaacacagagtcccagtatccatgtctgtgatagcaatgtcatcaagttgatatccttactttcagaaacacctgcttattgatctgattcttattggctggtccggccctgtgataggatctagcccctcctttatagagtttacaggctggtgtgtgaaaaagtgttaaatcaccaacttcatcgctgtgaaatgagttctacaaatgcaggactctaacccaggggtaccagatgtcagagaaatggcctcacatctgccctagcctaagacatggtcttaagaacactgctgccatggaagaccactgaggcttgagggaagcgagtgattttagggtgaccgaagatcatttcaaggaagcaggggttagaaatgaggcaggacagccgggacattagcacacacactgttataacccggggaactgcccagggcggcacgtcatgagaagttcctgagcgcttcccgttgaacgtatatatgctgactgcagggttttctgtatagcagttaatgtaacctagtcaccaagagcagtagacgcctgcttccaaaatggtttgtcctccccgatgacgacggaaatggtttcccatttaaatcatcttcacagactgttatgtccgtgaaagcatgaaagccttgaagagaagaggccatttcgagataagctcacaccacacaccacaggaaaaccccagaaaacacagtgccacgaagcaccgaagccctagattcatcatggactttgtttcagtcaaggttccttgaagggcagctatgtttccttgttagcccccgccctcccccaacacacacacacacacacacacaggtaccccatatacccgaccctgtgttttcactggttcctttggcggggcagaattcctgacccacttgctgatattccatgcctcacagtggccaatgaaatgccctgttacagtagcccctccacccgataccgtctacactggagcagctccccagggagagggaggggtcctgagctcctaccctgccctgaactgttcaccagatgcagagagaccatgctgttgaggttataggcttctcatggtgacaggcttctcgaggtggaggggctcatggaggaagcatactgcttctgatgaactttgacctgaacaactgtgattgataagattcctttgccttctgggaaacatcacatttccccgttaactctttacataagtgttttcttgaacaaagcctgaacttttatgctctccaaaatgttagttgcaagtgcaagaatattctttgaatgccttaactcacccctccttctgtccttcctttccttcctccccccctcccgcaccccctctctccattacttccttgcttcctctcattctgtttgaggcaggttctctcgtggcccaggctgaccttggatttggtatgttgccaaggctgatcttgaagccctaatcctcctgcctctacctcctacatgttagtgttgggctgtaggtgtacacggccttttcattctctgactttccctttttgtctgtatatgggtgtgatttaggtctaaggaaggttgttctctaccggcagaaaaaacaactttctacttcccccttgcctttgctttcataaatgttgcttttggttttggacgagtttctgagtcctttattctactagaaatcagcatcttagagggtctgttggcttttcttctcttaggactagtgaatgaatgcatgtgtggatataaggtggttccatttgcttgtctttaatttatgcaagtctggttaaaaacaagcaagaacaagccctgtctctaaattaagacaattcccagtggcccatttattttagagggcatttgagaaaggaaacttcccagagcagactgcatgtcagccttctacatttggggcagtcacatttgctctgctcctgtgtttgagtgcagtggtccgctgcaggctactgttctctccctgggattttgagctaatcaaggggttctataattcaccattaggctctggaaagtctagatagatcagagtttgggggactctgagactatggggtgtgtactcaggacctgagactccttccaggttcctgggtctgaaatggtgcctcctaggagacatgagagacagccatagggaaatatgcaggaaggggccgtcattttactccagagttgggactctggaggaaaaccaaatagtgtgaaacacagaaaagcattttctactatgctggtgctttcctggttcattgggtgtcctttgtgttcccacccctgtgttagcaagaagcggggtcagtaggacttggttcaaagccttgctgctagcccagctatgaactgggcatgtgacaggaccttgttggtccttagtattggcctttgtgagatgaacaagaacacctgtgccctgcctgtgtcactgtgagatgtgagtagcagtggctataaagacactggagattctaaatacaaatgccagcaagcctgagcttttactgttgtgtgttgtggggggaaggggaggggcacagcatagactcggcccctcctgcagaagcccagccgctttccctgatgcatgttctgattctgctgaagctgctcttgcatcctgttgcacttgtccttggggccttgaggatggaggagtggcataccaccatttctgctaaactcgtgcgccccttcatcttgtctagtgttgatgcttccagacatcctgtctaccaggtctaggagggagccagactgctgcattgggagaggagccaaatgacagaggagacctgttcatagcaggtggtcctcctgctttcccttctaggtcatggatgaggccgaggagatgagaactaccattcacatttgttagggtgctccctagggtgctcgctagggtgcacgcagagtgtctgtgggcctggagaagacagatgttattgcagactgtactggctggtgttgtgtcaacttgacacaggctggagttatcatagagaaaggagcttcagttgaggaaatgcctccatgagatccagctgtggggcattttctcaattagtgatcaagggggaaaggccccttttgggtggtgccatccctggactggtagtcttggttctataagaaagcaggctgagcaagccaggtgaaggcaagccagtaaagaacatccctccatggcctctgcatcagctcctgcttcctgacctgcttgagttccagtcctgacttccttggtgatgaacagcagtatggaagtgtaagctgaataaaccctttcctccccaacctgcttcttggtcatgatgtttgtgcaggaatagaaaccctgactaagacacagaccgtgttaagtatccattcatttcaacctgtctgtgccccttcggagaagttgctgcttcccaaggtagcccatttcctttgtggggaacctgggctctcaggagttgtactggaatctgctgttttctttttgtttgtttggtttggtttttggtttttcgaaccccattggtctctggggacccagcctatctgtctcctttcccactgtggcctttcggagaatgagtaccagctccccacatccactcaccctgtcactccttcctaaaagcaagggacatttgagtggcaggtggcaggtgaagcatcccctgggctaggaagaaaggtctacagtgggtgaatgatcacactggtgtgtctgacctcacggattagcataaacaaggcagaggtagtagcgacctcagggtaagggtggttgtgtcagcaaggacaagtcccttgggccccttttcaaattatagtgtaagaaaatggaggccttagaaactggtatttttaccacattcctataacgctaaagctagccggtcatctgcgtttacagaatgctctggctgctccaccatcattttctccctgcctggttcggtgcttcacacatgacacccaaaaagccaagttagtagtgactttccaatttctgccattcctgttgcctatgaggatacaatgcagagccaggggttgggattctgtcagcccagcaggcacaagttaaagggcagtctgagcctgagcgtcgtagcaagactatcaatgttctgccctacagaaaggaagtgacttatgactctttgtttagaatttggtggtcttgaggattacacctaggacctgggcatcctaggcaggtggtctaccattgactatatataggtggtcacctatatgcctgcccctctgagctattttgattctcgtccctctaagcacctgctccctgcccttgctccctatgtgtccacaatgagctactgaggagaggcattcagcagcgagatgggcttgtgtgcctggcctcacagagtctcagtaccctccctcacagtgagcatgccttagtgagaatgccaaagcctgttgaaggcatctctctaagggaggggacaggaacatacctgggtcttggttgtcaatgacaaagtgcctccatgactcagagacttactgagcctgtgtagaagtgggaactagggattgctcagcacaaatacagcagctgttatagcagatgaggtgcacatagacgggacagtctaagactcacagtagttctgttggaccgtgagggggatttcttgttgagtgatagctccctaaagaggaaataaaatggatggctttctaaccagccagccatgaaaaaatccaccgcatgaggcctgtgttcacacagggaatggcaggctgccggtggaggctgatccagatggcacgtctgggctgggacacatgatcccagtagttgaaggctttctttcccgtagggatgtattctggtgcatgtgtttatacttagccttcttgcattcctgtttgaagtggacattccgggagagaaagacttaaaatacccgaagaaaattgacaacagtcagtcaactctcattaggagcgtacgttctaactagcgggctggactgggctggcagcagcatacatttgcaattgactagaacagttacagggtctttcatggtttgctttttatggtcaggatctcatactatagcccaggctggcccgaggctcactatgctcttcagattggctttgcacgtgggcagtcctctgtctcagtgcttcctcattcaaagggtgggatgacatttggcctttttatgcccttgagtgaggaatattctgagaaatggagatgtgggcgcccagtgttcttatactaactagggagactgttgttaggcccttgcagcagatgggactggaacttaaatttctacttgtattaatttgttgtcgcatatattccatcctgaccacagtttccacacctcctcctccatgccccccacttcctccctccctatccactcctcctccagttcccttgagaaaagaacaggcctcctggggatagcaaccatacatggcacattaagttgcagtaagactagacatctcccctcgtattaaggctgaacccagtaggaggacaatggcccccaaagcaggcaaaagcatcagaaatagtcccctcccttttaggagtcccacaaaacacccacctacacaactataacacatttgcagagggcctaggttagactcactactggtcggttcagtctctgtgagccctatgagaccaggttagttggttctgtcgaccatattcttgtggtgtccttgacccctcatgctcctacaatccttcctccctcaggattcccaaaactctgctgactgtttggctgtgtgtctctgcatctgtttttatcagttgctgggcgaagcctctctgatgataaatgagttagaatagaattagggagaagttcattgactttttttcccccgtcttattttgttcttttgtgtgtgaatctctgggctatccagcctctggttcctggtcctccaggcagtgtcaggcatggacatggatctcaagctagaccagtcattggttggccactcccacaatttctgtgccacctttaccacagaacatcttggtggcagaacaaattatatatagggtgaaggttttgtggctgggttggggacacatacatttgtgtacacacacacacacacacacacacacacacacacacacacagagagagagagagacagacagacagacagacagagaagcgtgtgcttagacatcagcatcttttaaacagctagacactggcctttagagcaaactatttaggcatcctaaatttacagctgtaccagttccaattacagggtacactgctgtaatctcagcactcacaagttcacttttctcaaccccctcagccctctgagcctctgaaaattccatgaattggaataatctggtccctcagaaggttcctcctagtcctctccagccccacctttgctgttctccactgtgagagctccagcatcaacactgctcatgccaaatcctgccctgcttctaaagtagtttcagaatcattcatactcaacacacacacacacacatgaccacacacacacacacacacacacacaacccccccccacacacatacacacacacacatgcacacacacacatacatacacacacacatacacatacacacacatacacatacacacacacatacacacacacacatacacacacacacacatacacacacacatacacacacacacatacacacacacacatacacacacacatacacacacatacacacacacatacacacacacacatacaccacacacatacacacacattacacacacatacacacatacacacacatacacacacacacacacacacacacacacacgaccattcatgcatgcacacccacccaaatccagaaaacaatcctctgtaaccaaaagcatttctgtattccttccctttgccccagacctgccaggactgatggtctgtgagctgcttatatttacgtccttcagaacggttctgggatttatctgcagcacaagcagatgaacttgttttgatcaacttccaatgtgcggacatttttgttccactctatagttgatttgtttttaaaaaaatctctaatgtaaagaacattttgttccaaaagtcaaaactgtacaaagtgattcacttgggaaaaacactctgtcctttattacttcttcccccttcattcctgtccattgtttccctctgtttttaagtgcatgcacaagagagggcaggaaagaggattgtatgcctctgtgcataggcaggtaccgtgtgtgcacgcagagccagagccagttgacccctctaaaaatccccatctttttcttttcttttctttttttttggacagggtctcttgttggacctggagcttgccattttggctagtctggctacttactaagtcctagaatccattcgtccccgttcccctagcactgtggttataggcttgtaaccacacatgcctggctttcctccttgaatgcatgccatccaaacttgggacctcattcaagcactgaacccaccaggctctgtcctcagacttccaaccttgtgctctgctctttcagatgcaccagatagaagcatgtctgtttttctatttctcttccttcataggcaaaggacaacaacgtattaaatgcacatttttttatacaaacactgttatattttctcttgttcacgcagcacaaaattctggacccagacaagtgggctcctggaatgtaactgttttcagactttccggtcactttcaaaaatcttatcatttctaccagtaactttattcaaataaacgttttcaatagggactatcatttaacttcttggtaatgagcactttagaaaatgatagaattctacttaaaatggagtaaccctttttgtcatcgcctgaagttgatcccaggtacagtagactggaggtgagactggggacaggacgtggtggtggttgtggtgggaaaccttgctttcctatgaaaggtatttccatacaggcattagcagaattattctgagaagtcgtcatcacagaagggttttacacatgcttgcttatctatactccactacaatgggcaaaagacctgagaggcaggcctatagttctagtgtaaactggtagatgtgatgttacagtaaaattttactttctgacattcttagctgcacagggtaacatttagctaacttatgtcatcattttttaaggtacttgaatcatgtatgaatccagaagaatgttgttagtaagtgataatctacatttggcgtggtaagaccagaaacaaaacatgacaaaggtctgtcccagggtcctttttgataaataatggaattgaagacctatttaatcttcatgtttaagaaaccattggctcctgcggcttcccatgcgtatacttcatgccggtcttctgagttttacttaaggatgtggctctggattgagtttaactcttggagttgagactgactttgggattatcccaggctaagctgtcatttgcttatgctttgggaagctctgctggtctagaaacctcatctgtcctctgcatctggttatgttagtagcagggtgcccttcaagtctcttttgcattatccttgagagtgctttgggccagaggtcagaggatatgtcctgctcaccctacaaccctacctaacttcatcttgtgtgataagcctggaacctcccacaactttgcttctcggtcctcttcagagggcaaaatggagataggatggccctaccagggcaaaggatagtcctagagtctgaatagtaaagagaatcaggggcagtgaacgggagcctttcttgagagtagagagaagtccctgggcaaagattccagttttgctgggtgcttaggaacccattcagcccccaaaaggcctggagctgagggaggggcaggaggagagcaagtaggggttggcttgatgaaagtagctcatctcctcccaccagagttagtgaaagggagccatgctggctttgcattggctagtaggtgggtgggacactgcagtctctgtgatggggtgctggggtctgtgtgcagaagcctctctgcctgtaagggtacccgcttcctagcagctctcgttgtgcgccccaggcccataattcacatagcttggctcctgttagcagttaacatttggacatgcagatggtccttgtatgtaaaacctgggcagtcatgcacctgactctcaggcatgcctgagcaggtgtggggttttgtgtatgtgtatagagacagggttatggggttgcagtcaagggaagcagagaagacaacaaatagtcggggacacttgtgtatctgccaaaaccttcgcagcgcaggtcttcctataattgggcagagggttgctctacctctctgccttctgcagggcaggctgggagagatcacagccagaggcaaagatcaagacaaacatgagtactttcccaggactggaggtcctgccgcagtagggagacctgggctataaaataggttcattggatccctgcccactgctctgggtgttctctctgacctcagcttggatcacttggtacccttccttgtgaagtgggtggccaggtatcacagtgagtggagagagtaaaaactcccacaatgacagcccaggatgctttaggtgtgggcttctctagatcggtcccgaggggagtgtactttctagcaaatcatgcatgtgtgtcagtgtggtcttcacaactctgatgcccacactgctgctttagggggacactgtcttctgttctgtgcacgtgtgtggctccgcagctgtgctcctgtcactgtactcaaaactgtgtgtgctaccgtaagactactgcacagccgggcaccggcacccatggatgtcctaacgggtcctttgtcctctctgcctctctcagagaattctccaaggaaagagagaaggctaaagctcgtggagatttccagaagcttcgggaaaaacagcagctggaagaggacctcaagggctacctggactggatcacccaggcagaagacatcgatcccgagaacgaggaggagggtggcgaggaaggcaaacgaaacagtaggtgctgcccttccttcccttgagcagacagacttgctgtgtgattgaggtgctgcagtgtgtcccccatgccctgagcctctaccccggggctgtgagtaaaagacaccttcccagttcccccgtcctgtctgcctgttgacatcgcagagagaatagtgcatctgtgcacactctgagtctccacctgaggcgtgggctctagggggcgtaggtaagatggctttttagctgagagggttgccatttgcattgtgggccttgggagctcagacccatttttctgtgggccaagggtagaagaagatacatctcagcttagggctatagggagggcatggtttctctcctctcggtgagttactacttcacctgcacaaggatctgagaagcaggtctcttccacctctgtgctctgtggagtggctccctctggtatcctccacacagagctgagtgcttaggccatcaggctagcaaggacccagctgattgtagtaggcagcagttaagaggcctgagagtgagtcagtgcttgctggtttgtagcccacctgcctgggcttcacactgtgacatcaggcacccttaagtgctttccgcaggaggcaaggcccaataatcagtcaaccactggaattaattgtttgtgccgatcacagagtctcacttacaacacacttttcccacagctgtgctcttagtcatcctgggagcacttgggtcttgggtaagggtaggaattgaaacctaacggcacatttgactacgatgcttccatttagtttccattctggaatagttgatagcaaagatggagaacacgtttcaagaacaatgtccctcgaaaggcctgggaaaccaaggctcgcctaccgtgtagaagatattgagtaagctcttgctgaacagagcccttgagagtcagggttgcttcctccttagctacattcacaaatgactacagccagcgcttgagatcccacaaaggacagtggataccccaggagctgtggtgaagagctaggatgggtggggccatatggcgtggtctggaaggttggtgtctgtggaagagcagttgagtttgaggagaaagcttccatactgagactaccatgagtgagcaaaggccatgttccgggactctgttgggttgagcacagtgggttcgaaggcagagtgagccacagtgggcaggtcagaagagatttatttcagctgactgcttatagtccatgcaagagggacgtcagagcagaggaacataaggtaggaacctagaggcagtaagtgaagccaaggacatggggaatatggttgctccttcctcctgatttgctcagtttgttttctaatagaccccaggaccactgtccagggatgatagtactgtccactgtgggcaggacccttcctcaccaatcaagaaaatgtcccccaaagacttgcctatcggccagactgatggaggcgattcctcagctgagtctgtcactgatggaggcgattcctcagctgagtctgtctcttccctggtgactccagcttgtgtcaagttgacaaaaactagccagttcagagcattatccagccttttcttcatttgcagcattgacccgtggaagccccgcttcaccctcagaagcctaagacagtgtgccgcgtataatctggagaaaggatggtctcctgttctcagccgggcaccttctttcctgcttttaaggtgtcactcagatggccccttgcatgccattggcttgtcatgtccttgttgctccaccgtgagatctagactgtactcagcctcttgggtcgctactgtccatcgaggtagaggtttttgttttcataaatgacctgtgctatgaagcatggtttttcctggacttggtgtcttctgatggtcctaacaggatcactgtttatgtgaggttggcctcacctgtgtcctgtcactttctataaagaacatgactatgagatgaccagtctctgaagctgttgctgtattgacagaccaacgggctactcttagaggccaggaggtcccagcaatgctggagtgcaagagtgaacttgcaagggaggctttgtggagctccacttctgggttcttgggcttgctgtcagggagccgattgaagtcaggcactctgggaagtgctccgattttctgatctctggtctacaagtcatggctgagtgtccaaccctgactgtactttacaatctacctgagggtctcatctctttcactccctggctcagaggtcctagttgtttaagcagatggcaggggacctctctttgtgtgctcctgggagttagtcccagggagccctagttaggaatctctgagtcttgacctgtgtcagtggctgaatctctcatgggtctaagaattgtctggagggccctatcctaggtatctgatgctgatgacagggaagtctcctgtgagcattcttgggctatttaagatatccacagtgtaaacttgctattagaaagctgctgcgccacaattaattgaatagacaaaattatctcagaaggtagctcctgagcatttggggaattttcaaggataatttatttaactttttgctgagcttcaaatttctttaagaaaccctgccaagtctgtggggcgtgtgtgtgtgtgtgtgtgtgtgtgtgtgtgtgtgattttttttttggacacttacagctgcttcttcatgaacaatggtgttattctagggctattaaaatctggaagcctaaaattctattttaatctcttctcattgtcatggttaatttttttaaaaaaattttaaaataatgaaaccattttaaaagggagcccattctaaaattctgaccaaatgaatcagggcagccttattgtggggactcttagggaccagtaattcctctaagtagtaataattgatacccaaagaaaggaggagcgggtacctgctgcccccattgcccacaagagtacctgactgtagcctgcttccttgttggtcccagagtggtggccactgcccacccacctctcattgcttcttctaccatgggcctcagtgcagaaggtcaccctggctgcctgcctggccagtgctacctgatttttgtttgtctgtttggtttcctgcattggtttgtttcaggggtcagcagagagtcacaggtggcatagctgtttgtaaataaacaccatggtgctttgctgaccttgttttgaaagactgtatttgaggaatgcagctcagttggtaaagtgcttgcctgacatgcacaaagccttgtgtttggtccccagctccttataaactggacatggtatgccataatctcagcactggagaagaagagacagtgtgatacaaagttcaaggttacccttggagaccaggctccaggatgtgtaaaattctatctcaaataaaacaaacaaaaaaaaaaaaaaaagaaaagaaaagaaaaagaaaatcacatttcttttttttcttttaatttataagacagctttttaatcacaaagtatcccaaagaagtttagaaatgaaaatattctaccaaaaaccatagaagaaacagcagcagtaggtaggtggctcacgataaatatgagtccaggtcacctaccctctctggaggagcagctggcagtgctatgactggggagactgatgggagggccagccctggggtcagaggttggatgcagtgcccactgtcatctgccctggcctgctctcccctgggacgattaaatcagcacatgccgtgtggctttcatcacaagcttaagcagtctggtatttatttactcaaaggtcatggggcggcaattagcatttatctggcatttcgtgtgtatcagatgctgttcctggggctatgggcacatgagttcttattcttcacactgctctatgagacaggaacttgatggatgaggaaatcagagtgtgccagccttacatagcctcccgaggctgcgcagtcgtgaagcgctgcactggagttggaacccaccactgttggcgctcagggtagcagcgtgaacctgggagagtggggcctaaaaaaacaaggtggagtaaagtcccatgcaatagccagctttattcagagcatcagacagtttatactctgggggttaacaagagtcacctgagaaaagtgtacagtcaggaggacaagacacacatggcaaaaccatgcttttccttggaggagtaaacaagtaacaatagccagttgtaatgaatagtctgaagtgagctcactcctattcactactacacccaggaaggggacataagcgcattccaaaaacaacccacatcctgttgcaccgaggttataagacctcttgtcttagttacttagagttttctcacaaggtctcagagatctcacacagctttgttcatgggctatgttccaactcatgggtattggaacatttgtgccatgttcttcagggttaggttggggagggggaacttgcagtgtggagagagcatgccctttgtagaaatgcagtagtcccactaaggtgtaggcccgtgttcctatgcttttgcaggccccaatatggccccctatactgcctgtgcactcccatttctgagcatgcacatgtagactctactttagaggttagctggatggcttggcacgagttcagaaatgcagcactgctagatgtcagagagtctgtgactgtctcccttgtgacccgatgaccattaggggctttagtaacaaggatgctaacagttatgggtggtcatgtgtcgctggagtgaagcacatcgcttctcttaccttggttctcatttacttcttctccagcaactcattagcaatggcccagtccttgctaatatctcacgagtaagcaacactaggtaaccaatccatgttcatacagcagtgggaggtacagttgtcagagtccagagcccaccttcttcactgccacctgccctgccccagagaccagtcctgattggcatcacactcccaattcatacccagagcctctgactccctgaagggcactttccttaagcactttcttagatgcaaggacaaacataggagacctgtgtcacaaactagatagtagattgcgcattcagaataggttctctgggacaggttgacaaatgccctcaacccttcagatcctgagctatagattcctagctaggaggagtgggtggcaaaagtggattggagacatgccgacatgcctcaggcctccgctgttccacactggaccagctgttgctgccctttctgcccgcctgcttgcctgcctgcctgcctgctaggctgccctgtttgtattgctcttgctgccctctactgtctggtaatggaattgcctgtgttcaacctgaaggggtcacggtggctgatctgctaagagaggataagaagaaaaggaagttttgctgctttcgacaacgcagggctaaagatcacggtaacttgctgaggtgttcttgctctgtggaggctccttgcctgacgtttctggtttcctctccctgtgcataggcattgcgtgagctgcatgcgctgtgtggaaagtgcctatgttttaatcgcttggtttctctgatgcttggtcatgcttggtcttttggccttttccctcaaacgtgtggcatcactgagatggcacctttccgtttgcactgtgcctatgaagaagcctctgagccaactgagggagctcgtttgattcagtgtgaatattcttagcctggaagacacgcttggaaatgcttttccttgaatgatgcttttaagtttaaactgtttagaaattccaataatgttatttggctgatttttttttccaggctacatgtttcaaattgcttcttgggcgtcgctggctcatttacccaaggccatgctaaagctagtaatctcagcttcaagagtaagggaggtagcccccccccaaaaaaaaaaaccaaccaaaaacagaacaaaagccatctgggggcactcagttctcttcaatgagaatagccttatttgggaagtataaagttaaatataaagttttgtcctaaatactgttgaccgcacccttaccccgtccccaaccacttgacaaagcatccaggatcattaacatagagatgtgtataccaagaacagcttgcccagctgtctgtgggtcactgctgtagctgggaggcagtgcacgctttgcttggataccttggcatggacagcttagtgctgacaccaagatggaccccagtcagaaagaggaaaaaatctttgagaagacatggactgcagaggcagatagccagctgcgcgccagccgctcacccagaagagagatacacggcatggttttgttgcagtgtgagaatgctgagctcagaggttaagtggggttgtctgtgttagaatcctagcctcctcagaaggcctgaagaggaaaggcatcaggggatagtcagatggaaagcatttggctcacagggccctaaaagctcgagaaggaagaactctgtaaagcttgcacaccaatataggccaaggatgaagccgacctgcttgggtttagtatttacaacatgctgatgagtgccttggggcctctgtcaagagaggtaacccctcctgggggccactcacctcagtagcagcgtggcctctggggtggtttgacgatgtgagagagaggaagccatcttatctctttgaggaagctggcttcctggagtgaggaatggccgttctattgctgggaacacagaccgactctgctggcgatggtggggcaggaacctcggttgctgtgccacctttcccacagtaccacctttctctttctctaacaaagagagtagtttttctgggcacaactccaggtcttgattcagacctggaggcctcagtctgaccttgacccacatttcccaaggtgaatgtggctgcgtcatagaaatccctcgctctgtgtgagcaacacgcattagcacaagcatgtagcggtgccttcaggggccacctgggactttggggtttagccgtgttgtcacagcacgacgctgctcatgcttgccatgaaaatgatgcaaggacagaagagcttggggtcagacccctgttcctggggaaggagcacagtcctgccactgatgcgttatccagccttacctcttgcccccatcccttgggaagcttagcagcatcaggaagtactaaaagaaatccccaagtgtgggcgagagcttgtgctgagaaggggagatataaggctctgtgataagctgagtgcacacactgctcttacaggggtgggaagtttagtgtggggcaccagcactgtataggtcacaggcacctgtaactccggctccagggcatctaatgccctcttctggccacctgcatgcgtgtggcttacgtttacacttaacatagatacaaacatttttcagaaggtaaaataattttaaaagcaagccactcagagtcccaggacatctatgcaagcagctgctgtcgtgacagctttcagaaggactgcagaagagctcagtgtggcgtattgaaaagccttcttccgggctgctgtggctggagggtcagggggctcctggggctgacttaggctcttgaggagccgctcaaatgctgtgttctatctcctggatattaggcccggagaggacttggattcaggttcttctgggcaggccgcagggctcctaactcctgagtgggtggtgggcagtggcttcccagtgctgctcaggtcctggtctccttgaagggctgggaaaatgtcgggagacttcagtcctcaagggccagtagtgaaaccagacagctatgggtgtttctgttcctcctgagagctggtcaaaggtaactggatcttggaggagatactggcctgcggctcaggtaacacagacacaacaaacgcatgccctagttatgcgatgatgaggccaggctccccgactgctcctctgagtctttgacctcactgaaagaaatgacctggtgaattggtatatgccactccgaggtgctgcccagttgcatagactcatgtgtgtgtgtgtacgtgcgcatatgtgtgtgcaaatgcatttgtgtatgcctgcctctgaatttgtacagctgacaagtatggttgtgaaacacgtagtttatagagtgaaagttgatgaggaaatatctgtgcgttggttaaggatactaggtattgtgctagcttgagaaatgtccatcatttggttattttgtgaagtatagttcagagtggaagccaggcctggtactcctccatgttaaagaaaaaaacagtgacctgcctcctcagggagtggctccaggtagcgcctcgcctaggctgtctatgccaccaaggatgagctaggcagctttccaacatccccctacctgcagcggcacccaggttcctcccagctcctccccgccccccagcttctagtgctctccccagaggtccaacacctgaagtagaaacagacttgtaactcctccctatgcagatggccctagtgtgttcctgtagggggtgactggcatctgcaaacagcaggaggttctgagaggtctgcctaaaccctagcaaagccccagcactgactcctgctggggaaagaagggtagttactccataagatgccatggaggccttaggagaaatgcacctgtccccgggtttatcacatgaatttttgtaatccttcctgctttgacttttatagagttgcaatagtcaccagtacagcttgttactatctccaggaactgggcttgtctgctgggtgtagtgtgtagacatgggaatactcagtagcatttaagcttgttccaaccctgtggtatatcagcctacttaagcatctctactgaaactgtgggtatggtgtgccacacaggggtgcatcctgagtgggatgggagtgagctgactacccctgtggcaagccagctgcttggtcatctgggcactcacgtcctttgctgtgtacttccaggagcctcttccaacactgatggattcttctgtcttggtcgtttttaaagtgtagatgagaacctttgagggctaagtgcaggaaggaggctctactcagtcactagcatgaaagtaaatgtgcggtgtgtagccatggaggataaaatgcttaatgtggaagctgggcccacagccccgccccagccaggcccacagccctaccccagccagacctctgcagggggtgggtggagctgaacaccgggctacccagctctgcagagcttcggccccttgctcaaactgagggacctgatcaaggttcaagcacacaatgtcttcatcctctcccttccagagccctgatgacatcattctggaatagacaccacactcctggggaccctgtaaatgatggtgactgcagggttgctgtccctacaacatgctaaattagacagtaactcctcttaagtcaaaaaaaaaaaaatacacagagtggtagcccacactaactcagaagtatagttggctgttcacactagatgctcctggacagcaacgagaggggcctgggcaaaatgaccacaaattggagtgctttgctttcagagatcctccggagagtttttctgataccattggcagggtctgtgcttggacaccttgcccatgacctggagccaggactgacacccagtgtgcctcatcctgttcagtcctgactgacacccagtgtgcctacagcctgttcagtcctgactgacacccagtgtgtctacagccctgaggcagatgctcttaaccatatagatgaagacatggaggcagagagaagccaggccacaagtgggagttagatttaggactgataagcacatgatactctctggtactgtcctaccaccccagaggatgagtgggagagtctgaggcagggaggcctcctcatcctctgtgtagcctggcctcagggctccacagttcccagtgttggttgccattcacagtgtggggtttgtttcctgcctttctgcctgcacagccttgggaagcagctaagagtggcactctaagcactcagtaagagtggctcactaataattagcatagatccagagatgcagagtgatgtggccccttggtcacaggccggccgtcacctacctgcccccatcagattgtaaaatgaagctatagggatgaagagccacatcctgcactgacgatggcatgcatgagacctccagagtgcaaaagccacaagacttcttctgttcagaagtttacctttgaaaactagtaatgtttcaatatgacaaataagagaattgtgggggcacttaatatggacagaaatggccctgaatgtgtggttcacactgccattttatcactaggaaattgaagttcaaagagaggcagatgttctcatgaagagtggggcagatcagggcctggagattcccccaaatgcacagcacatgttatgctacctcagcctcagaaaccagcagctatcccaggtcacaaagagagggactcctggtgggatctgaaaagagtttccagtgtggtcttccgcacctgtcagtacaaggggcaacttgcaacaagctgctacaatgatattacagcctagtcttacagatgggagcatagaacagacaggagaagggggctgtgtgtgtgtgtgtgtgtgtgtgtgtgtgtgtgtgtgtacgcgagtgcatgggtcttaatggagtacttgctgaaggatattcctgtgtcagatgatgagacttcctaatttgtttctttccctgtgtcccgccccctccccccaccatgggttccaaagtgaatggaggtttgtagttggttgctttgaattcaaggaaaaggaacaggagagtcccaggagtgtaatcagttggtgttcatttggcctctgcttctgaaacctgggcctggatgtagctgctaagcctcccgcagcgacaagctcagcttcttgtgtgttcacaaagggctcagggacttccctttgtgcccttgggagacagggctctctgacctctgggtctatgagtcaggtcccactttctccttgcagtgagctttctctctctctcctcagcagggatggaagccacacagtcagtagagnnnnnnnnnnnnnnnnnnnnnnnnnnnnnnnnnnnnnnnnnnnnnnnnnnnnnnnnnnnnnnnnnnnnttcgtgcgggtagtgtaaggttctgaacactgggggctctgcctcaggaaagagatgtccatgagcctaggtagcttccccagcttcagtttgggcttcctccccctctcagctccactctgtctcccagcataatcaggcatctttcccaagggcatcttgcacagactcctgaggtagctccattcagggacatctgcccctcaccttccaggtgaccacatgtcagacgttggctctgggggatccagggacctccaagcactagtaggcccgttttacatctcttccccttcttctaaggatcctgacatggacctaggtctcagagacatcagacctgggactgaagttggccctgccctgctcgatgattggcaagagccctcacctgctctctgctccaaggctttccttctgctttcatagcgctccagtgctggcttattcaggaagtaccttccctatgctggccgtacactctcggtggagcttagacatccaatcaactgccacagactgagtggagctcctgacatttgaaaaacgtttatgcacgtgtctctatgcactgcctcctccaactgtaatagcttgtctttggtgtgctgtaaagacctctccatgagccgtgaactctgcagaaggggccagtggaagcattcccatactgagatatttgtataccttctctgtagtgctgtgatagagagaacaggcctgtgccaggcctgccggctccattcactgtgacaccatggcttcttttcttgggaagcatttgggtcaccagaattgtctcttgcaggtgatattggctttctctgcagccactgaaagcgtaggctcagcctggcacgcctgatagccctccttccggcatcctgagagtctgcacctggcccaccgcctggcatgtcatgccacagcacgctgtctaaagcacttttcttctccccacagctagcatgcccaccagcgagactgaatctgtcaacacagagaacgtaagtggtgaaggcgagacccagggatgctgtggaactctctggtgagtgtggaggctgctcagcctccctttaccccactttggagatgctagcgctgagagggtacccccagaggacagtggagtccttgggctctggaaggagatcagctgtgctccaacaggctgcctccagccctttggtacccctcctcctataccaggtctgctggggcatctcagcatcttgcctgcctctgctgtgacgttgtctgcctaaggcagggcatgggaagtgtgctttttaacccagccacctgctctgttcattaggtgctggtggaaaagaagaggcgcggccaagaccgggccctctgggtgtcggcggtgggggtaaaggctgatttctcctcccacttgggtttggtatctgtgctttgaaggaagagcttgaatggcagagttgctggctagaatgtgccacatacttaaatcttccttcacccatgggaccttccaaccccatcccggcagctggatccggaggtcccgccctccactgctcaaggccccgtgttttggagctgtgtttgcactgccctttcctgaccacgtggggcgctatccccttgagggttcccaggcttttctctagataactgggctgcagtagcagggttggggcagcaatgcagaatgtgccaagaactgcctgctttggggagcccggtgctgatttgacttgtttgcttcttgcctgcatcgtttacatcttattcctccaaaggacgggtgtcatctttaagagaactcaacctcatttggggcagaggttcataaatatgacacacacactattgggaggtatggcgatggctcatggagcgattcacccctgttctcctgctctgccctctctatgacgtgaagtgggctgggaatggatttgctgtccccattttacagatgagaacactgagctttgcaaggcatgctgtgtccccacccttacccttgctgtgatcgcaggagccaggcaggagcaacagttgctactgttgagactggggttgcaggccacagtggcccagcaaactggcttccgctagagggagggaaaggagaaggaccctgcaccggtccatggccagtccggaaatctgagccttctcttgtgcctgggcccttgggggtgctcctggcacaccgttagcaccttgacatctgctctggccttaaccaactggccagctattaagaatcagccacggggaaccagagtcctggcttctgtgcatggctttagccatctctacttcagtgatgggcacttgagctgaaccttccgcatgggagtcttaacactgttttcttccctttcagtcaggccatctcgaaatccaaactcaggtcagttctttcaacttgctttccctccctccctcnnnnnnnnnnnnnnnnnnnnnnnnnnnnnnnnnnnnnnnnnnnnnnnnnnnnnnnnnnnnnnnnnnnnnnnnnnnnnnnnnnnnnnnnnnnnnnnnnnnnnnnnnnnnnnnnnnnnnntccctccctccctccccccctctcgcccctccccctctctcgcccctccctccctctctcccctcctttccttcctttttttccccctcagagcttgcattacggtttttatgttatgttttaaattctgacttttatgtagaattggtctagacttgagtttaaacatggattcccagatttcagtcagtctttaagtcttacagcactgcctcggggagcaggacggagcatcagcttttaggcaggagcacatttgcctctttagcaaccctccagtcacttctcagaaagattctccacaaaagaaggtacaggagtctaaggcacctagtagtgttcagtttccagccctggatgcaggctgtgtgttcatcttgtaagtccccacatgcattttgtgttctcttcttatgtgttcttttcaattaaagacatttccctgctgtatgcaaacagtagtcataaaactaagaaataaaacctcaccctgtagaaactccgaaagaaaacgggagagaaagcactgtgaccacaggttagacaaagacttcttaaagatcattgcccaggacatgatccatatgagagaaaaatgatagattgatccccataagaattaaagcatctaactttattttattataaaatcaaaagaataagccacagacctgatcaaaatatttgcaagtcatatttgataaaaggctagatctaatatgtaatctaatatgtgatctaatatgtgaagaaaataatatgtagagagacagtattaatggcaaacagccctataaaagtggaaagaaggttccagcacacagttcacaagaagaaagctgcatggtatataagcaaagaaatgaggaggacattgctgggtgttttgggcagtgctggcaggcatgttatatgacacaatcattttgaaaaagcctttagtagtcgcttataaagctacagtaatgatatgacctagcaattctaattatacggtatctatgtaagagaaagaaacttacactaaaagtatatgtgtttgtagtgggtttattcataattattttaaagtagaaataacccaatgtccatcaaatggtacagtgagcagatcagttgtgatttatccatgtggtacagtacttctcagtgacagggagaagggagtgttactgagagggccactaagagggcttagtgggaaaggtgcttgctgtgcaagccaagcgacctgagttctagcgccagaacccacataaagatggaggagaagcaactcaaccaagctgtccccaacttccatgtgcatgtgcaccctacacaagacacacatatgtgcacatgcacacacacaacattaggttgttttgttttgttttttaattactgataatgttagcaatactgatgaatctcaaaaacattttggggtgaggaaaatgaagcctcgaaatgacacatatgatgattctggttagtaaacagcagtgagcagagaagacagaccagtagtcctgagctggggatggggcatgaatggactcacatgactgatggaagtggtctgtattccgactaagcatagacctcaaaaagaataaacctgctgcaagtaattttatctcaacctgagtctgaataaaacttaatgagtttgtcttagtcagggtttctattcctgcacaaacatcatgaccaagaagcaagttggggaggaaagggtttattcggcttacacttccatactgctgttcatcaccaaggaagtcaggactggaactcaagcaggtcagaaagcaggagctgatgcagaggccatggagggatgttctttactggcttgcttcccctggcttgctcagcctgctctctcatagaaccaagactaccagcccagagatggtcccacccacaaggggcctttcgcccttgatcactaattgagaaaatgccttacagttggatctcatggaggcatttcctcaactgaagctcctttctctgtgataactccagctgtgtcaagttgacacaaaactagccagtacagagttgttttgtgggtctctgttacaaaagaccacagccctgtttcctagtttagcatctgcctctcatcccctgcctcagcctttaacattcctctggactcctcccctgctctgtagccattctggactgacctgtcctcataggtgtcttgccttggtgccttcgtctccagggtctttggcctggagtgtcctccgtgaagactttcaattgcctcaggaaatctcttaatcattgaggtccagcccttctcttaaagctgggactagacttggtgtaaattttgcagttgtcatttgtccaccacccttcatgcctgtcaaggccaccaaccctggaactgtaccatatgcatctccagttaccggcaccagacacctacatagccagtgttcaggagtgcagactttcataccacccacacataatcgagcccaggagagtcaggctggtggtgttacacatttccaggggatacagcactgaggtcttcgatgttgaagtcacatgtagcttatcactgctgtacaaggtagacccaccaagcatagcattttgggaccaccttacttatgtgtatgggatcatgtatcccaggaaactcagctgtgagctattaagagtcctcagtagagttatctgtgccatttgtcccattgaaaactgcagagcagaataaaaacaaggcacaacttgctggatccagatctactcaaagcctgtcctttgcagccttcctgggttctatgtgtttgacatagcaacacagccaagtcagccggggctacaatgtagccagctggggctacattgaggcagcttagattttcctcctaagtcatacctagaggaagtgccctcctcccagacactgaggcaagcaaggccaggagaaaagggactttgcagcctggctggttcgttcctggattctaggtctgtggtccgtaactgtcctcttgtggcaaggagatggagaatgttttccacaaggagacaggcagagggagaaaatgtcttcctctaattacaaacagagacgggaaggtgggcggggacatgtcacatgtctgtttggttctgctcattttatttttatgaaaacacgactcaatattggatgttctcctaaaggtatattttgagcattgctagttaggaagggcacctggtgactcagcacgaagacacatgtcccactcagctttgacacctacgaggcgccagaggaacggcagagacctgagaaaggattaaaggcttccctaaacagaaagctatggccacggactgtttttctctgtcaaatcgtttctctgtaacgactaagctgctacacaagacacatatactaagctgagtggtcctgccccaccgacctccacagatcacaagctacacggtgcctacaagagcttcgtgtgtgtaccggtgcagccttgaatctgctcgtgagtctgtggatgtctgggttctctaacccacttgcaggctgcatatgtcagaccctgcagttatttatagccagcggaggggaagtgagagcacgattccttcacaattatactttttagagctatatgttcagaccagcagtttacatcatggggcctcttcttcacttctgtgctgctgggtcctgtctttcctgcctacgctatagagtcagcctttattactcagtaaagttggtcggcctctgagatgccatactcacccatggtctagggagcaacgtttgcttgtttttcagccgtcgatggcgtcgctggaaccggttcaatcgcaggaggtgcagggctgccgtgaagtctgtcacgttttactggctggtgattgtcctggtgtttctcaacactttaactatttcctctgagcattacaatcagccagactggctgacacagattcaaggtatggccggaaggtgttcttctgttctgaatttgagatgcttgtcagtagctaactgctaactgctggtcagtatccagctgtggtagaataagttagtaggactaactgagatggtaaagaaccattcagactcaagcaagccctgggacagatgtacagctcacaccatgcagtgtccgctaacttaggccccaaacttgagatagcccaggaccaaggaattttggaattgagaggcacttctccctgccatattggaagagttaccctcactttagtatatttggtcagtaattttgattctgctactttaagtgactagaacaggggtacatagaggccatctccaaaagagcccgttctagaccggacagtttagaattcttgagctgtccttctgtatattcgcttctgctactctcagcctgtgggacatcattttttgttacacacacacacgtgcacacacacacacacacacacacacactttggaactttggagatgactgggtaagcagagtaactgctgtgtaagcatgaagggctgacttcaggtccgcagaacacccgtgtgaaaagctaggcctggcaatgtatgtctggaaccccagctccttggggtagagaggatcactaggactagcttgggttcagggagagggtatctcgggggaatatggcagagatggatacagcagaacatgcaacatcttatctggcgccagcatatggtcacccctacatgcatgtgttcatcatacacacatacacagtcccccatacaggtagcaaaaataaataaaaactaaaacctgaccctagggtgctataagaggttactcatcaatgttggtttcaattgtttatctatttatttattttgtctttgtgtatgaggaagtatgtatggagataggagtgttaaaaaagcatagtatgatcttaatgcaaaatcttcaaagagtttagtggtgagaagtccagaaattcacatagtgagcacttctaccattttatagtcggtgaaattgagttgtaggaaaaaaaagcagaatacttgtacagactcatagctggggtgtgcccaacaacaaggatgttccccgttgctggtgcagcaaggagacaggataaggccatctacatctgccgtgggcactgataaagggaaggtgaaggaagacggagagccagagggagactcaaaatacaccggccccttgcctttccagacatcgcaaacaaagtcctcttggctctgttcacctgtgagatgctggtgaagatgtacagcctgggcctccaggcttactttgtctccctcttcaaccgcttcgattgctttgtggtgtgtgggggcatcaccgaaaccatcctggtggaactggagctcatgtctcccctgggggtctccgtgttccggtgtgtgcgcctcctgagaatcttcaaagtgaccaggtaaaggcgtgggtgcgctggcgtttgctcggctgtcccctccctcacaggaccctggccttaccccccttctcttgactcttaggcactggacctccctgagcaacttggtggcatccttgttaaactccatgaagtccatcgcctctctgctgttactcctcttcctcttcatcatcatcttctccttgctggggatgcagttgtttggtgggaagtttaattttgacgagactcaaaccaagcgaagcacctttgacaactttccgcaagcactcctgacggtgttccaggtgagccctcttcccacgctctggaggcactggctgcgagcggaagccagagagccttcttgggtctgtccagagcttagcaaggcacaaagattccatcttatcggtcacttcagcctcgtgcccctttggccgattttgtgtcatgtaagttatttgttttacagcgtcctccagccacctatgtgatatgacaagaagacaaaccagaacactttttgtttgattttgtgagcgctttgggagatagactgtaacatcttcctgctattcactagtttgtttgtttgttctcttaattcatgaggcatgtttgccatcctagttacaagagactcaagccaagaagtgaattttgaaacagcagtgaggctgtcctggtgtgtagtcagaggagtctgggtggtagaggttgtacctgcctctgccctttgccttgagtgagggtactggctctgaagctgattgcactgtggggccttggacaatgtctcataggggtcctgatgctggagaagtggtacacgagacacagtgctgcccatcagctggggtacactgagccctcctcccgtgcttggaagaacctggcagattggtttacagtggtactcaccttcccctccccctccctgttttcatgtgcaatcagcaaacatccagtagggctgcagaggcagggagcattgtgcaaagggcaagacatagtaggttatcacagtagcttttcctgtcctcgctgttgtgactttgatagatcacttatctttttctgaagggacagagcttagagagaatgatctcaaaggtatgtcacactatcatttgagatgcatagaattattgctataggccagggctgcttaaacattttgctgcttgcaaactttttttttaccccccaaaaatgttataatgttttatatatgtgtgtgtgtgtgtgtatgcacatgcatttttttatatataaatcaaacatttactggtaatgaattataaagattaaaaaaacttagtgcctaaacacacacatattttctctctgtgcctctgtctctgtctctctctgtctctctctctctctctctccctccctctctctctctctctctctctctctctcacacacacacacacacacacacaaagtaaaaataaaaaaataaaaagaaatcttaaaatcttgaaagtcttggggctgggagggttggtaagcacctgccacacatgaggacccaggcttggttccccagtccccacataaggagctgggtgtggcagtgcagttttgtaatcccagccctggagaggatagcagagcagaaacaacctaaccaaatcagtgagctccagccaggtccactgagagactccatcacaaaacacacagggaagagtgattggggaaggcgcccatcactgatgataactcacctacactggaatgcacaccatgtgaatggtatagacacataacacatgcacacacacacacacacatgtgcacattcacacatacacatgtgtgcacgtgcacacacacacacacatttgagtcttggctgaactctaaaagatgctgagcgcattcataatttttcaggttatcaatactttgaatttgcaattctcactcctagattcccacttttcataagtatgtacaaaacagcagaagtgtgtttaaggcctttagaaattattagaaattctgttccaatcccaaactgtaatttattttgcaagtttgtttaagcacaatccagtccaaagatgcagaaatctgactggtctctcccgaggagctatatatgataggtaagcagtgcaaggcattgccctgtgtgattaagtccatgtgtctcataagtgcagaagacttagtgtgtgaggtgaaatcactgctgctcacagcctgcagtagtctgcagcccaagccaagggagtctaggcagggcctgttggcatagaatggtgtgggagcatgcacagtgctaagtaggtatgctgagaattcctacctaaggctgcagggacattgtgtagtgcaccatgggccagtgctgccacaatctcaggctcattaaaggtttgatttgaaataaatttttgcttgctgcatgttctgaaatctcctacttttgccaggacttttctaaccccatgatcaatttagcaaccccagtgaaatcataccccatggtttgaaacccctgatagactatagtcttactttaaaatcatggcttctggtttgttactggttttccttatttctttcaggaaactcttacgcaggttttcttgtaatgttttcatatgacacaaaatttaaatgttataaaaagataccaactggcagtcctcccacccagccactaatcacttcctccgggtgggaacgggtatcccagtttcctgaacggtgttagataggtttttgttcacaggcgagagtcatcttacctgctcgcctatggtgattccacacatagagtggccaagtccacacgctgtctggcatcttgctttagtttgttttcatctgtaagaaatgggctcccctacttggttcacaaaaggttacacccttcttccaaacacatcatagtctgtaggtgtgttttggggggctgctactttattgggttcttatatataccacccttccaacccttattccaccctaatcccttcttccaacccccttctgtggtgtaggtcgctgatgtttctgtgaccagtccctcactgatgagtgttgaactattgcctgctcttgcgtatataaacagtgctccagagggtggaactgaatgtacaggatgcactggcacgtgttggagactaaatgtgtcagacatgctctccacgtggagctgctgggaaaagggcctggcttactcttgggacttctcacaatgtcctgcttctagtgggatctattcactctcaggcagcagtgtggagaccaccgtgcctcttccctttgttgagctaggtgtttgtagttcatgattgcttctagcctgacaggtaaaatggtgtctcttcatagttttattaggaataaagtcaagaaagagctcttttctaattatctgccagttgctgtttgatttgtctggacagaaaataaagaaactctcttcccagggggtagcattttttaaaaactgctgtctatatttatctggttggatttcggaatggattggattaccaggtatcatcaatagagaagatttcctttgaaactgatcatatctgttcttgaggtagtttatacacttgcacatgaccgaatgccctggttctgagaatgcacagagagattccctgtctctgcagtacatcagctatgtggaatactacgtatggagtaaaatgagcaagaaaaacctacttagtcagcgtctccaggaacatcactgaataggaaaaaagccagttgtagaaatatggtctacttcatgcttaaaaagatcagagaatatactagcggcctgtttctctaggtgtttatgtgtttgtcgattttaatctatagaggaaggtgccagacagacaggtatcaaggtcagttgctgtctagagagaggatagaaactagaagaaacactcttacttgaaagatcaagcaatctatagaaggtttaataggataacagatcagtttcattgtgagctgggctgagaaaggccttgaggggggacttagcagtgaccgaggaactcaggcagcacagccgtggtcgggagcttctgcctgttgtctgactccacccttctcttctcagatcctgacaggtgaagactggaatgcggtgatgtatgacggcatcatggcctatggaggcccttcctcttccgggatgattgtctgtatctacttcatcatccttttcatctgtggtaactgtatcctttggagccactggaactatgtggtcaccatcactgtctcgtttcttctgactttctctgtggttgtggtggtgacggtagcagctgtagggctaagggagacaaatgcctttccctggctagctccatgccagctttttatccatgtggcagatgggagccatgtagtatgagttactctcggggatacaagtgctcacaccggtgccagtagataatgagtgtagtgtcaggtctgcatacaggacaagcagggaagcctgaagattatgttgtcatcactgggaggctaggcctacatccctgtcgccccacgagcagtgaggagccactgatggtttgtcctggtcttgctttgctcactgctctctaccatgctgtgcaactttcctctgatgtgtttgattcctcttccctgatgagattcctgcagatggctgctgggggccattttgttcactgccaccagccccttcagggtctcgtaatgtttgccagttgtgtctgttttaactccttcgtgcctagcataagacctaccatgcgaagagtctttgtatcataattgtggctaatgagcatgtgtacagacatgatgacctcatgctcccgatttaaaaagtcctactgtgagtggctccctaatggtccagacctctggagctcattgctcccagtcttctttagtgcttatggtgaactttcttcagtgtagaaagcctagtgctagcccatcctgctgtctttaggggcagtgtttaatgctgtgagatttctggggaaactctctctgagtccttgggctcagttctagtaccctggcctccagagatatcctcaacccttttcttcctagttagagatgagctcactgacctctgactccccctcagattttatccatgtctgttggctatgtgtagagtcattgtccactggaactgtggtggatgccccctactgcaaccatccccaaccagatgacagcttcatgggccaggagtctccttttctgtgtttgcatgtttcctggtaagacagtgtggagtgtcccgtgaggacatttgtcaaatagatggtttttcttttctgttctcctcctgactgactgtagtcgcactgggtgctaggtttgagactgcagactgctccctgccattcctctccagctccatggtgaagctctctgtaacataggccaccatatgaaagccttcaggagctgcttgtgttggctgtctcttgctggaagctatactccattgtgtcctgtgtcctcccatatccccagtgcccagcagggcctggcctgcccagggtgctctgtagaatttctgaatgaatccacagaacacccctgttcaagaagtctgagccatgcctctgagtgcaggtggcaaactgatccggatttagatttgactcagcttcccacagatttactgtcattgcagagatgggattatttcctcctggggtcccttgagagagagacatgcttgacacagctgtccccagtgctgagagctgcccaagtcactgttgcaaaggctctcagtggagcttctaggtttcccatgttgtcagatggtttttccaagagttggtgtaacccacccaggtgtcttccctttttgaatgtcttgactagaattagacagcttcttgttgtgttcccctcacaatagtcttgctgttaggcctttggtagctttcaatgatggatgtgtatggcagcccacatggaagtttctaatatacagggccacagtctgctgcctgcctccctccttgcctgcctccnnnnnnnnnnnnnnnnnnnnnnnnnnnnnnnnnnnnnnnnnnnnnnnnnnnnnnnnnnnnnnnnnnnnnnnnnnnnnnnnnnnnnnnnnnnnnnnnnnnnnnnnnnnnncctccctccctccctccctccctccctgcctccttccctgcctccttccctgcctccttccctgcctcctcctacctcccttgtccctgctgtaggcttagggaaacagctataacgcacgtggattcccctcagacccgggcttcctggtattcataaatagtgaataaggaagtaaaccacttctcttgacttgatactcttgttaagaaaacattttttaaaaaaaaattctagaaaacatcacaagcaatgctatcattctgaaaacataaacgcttattcacccaatacattgccacttacaaaaacggtgttcagccatagtctagccacagtggggcccttcggaacatagcctattcttctctggcgggagatctagcttgccatttatagcaggtatctgcagagcaaagagcaggctctagcagccatgttagaggacgaagcctcctaatatattggacaatgagatcatcaggtcgatcccaagtggcctttgaaggcatctggtttgccatggaatccctcgagtgtgtatgttataacatgaactttcaaagagaaggaaaaacagtgtgctttgtgagcgtacagcggaattcaaacaaggggccgatgagatcgggtttccctggctctctggatgctcaggagaccctgcagagttttccgagcttttcacttggtttttaaagtgggattttaccaagttctccagttgtaccacgtgagtgttacccactcccagcctatgtgagcagcagagcgtggcactgccattatcaactacatgtagttgcatttaaaacacgttgtacccttaaagatttccaaattagatatcctgctgaatgtcttcttggccatcgctgtggacaatttggctgatgctgaaagtctgaacactgctcagaaagaggaagctgaagaaaaagaaaggaaaaagattgccaggtaaccttgtgttcaggaggcatttgcccagggatgctagggatgtccagccatatgtcctgatgggtctggggacacagacgtgcttcccaggagctggggccccttattgctgctttgcagtgattatggcgaccatgtgataccatctaaagagaagggactcctggataggagccaagccatcctctgagcaggaatggaagccacatatccctgtgtttaaagaatcactgcagtcaattttggtgtcataaattaagtgatgcattcaatgctgattagctcttggctgggaattttaatgaggtgatccgtgcaaaggctccgttgcatgagatgaacaggaagccctgagttagggttgtgctgtactcttggcatcatggtttcctgttgaatcttggtccttcatctatcacggtccggtcagaaccctggttagccctttaaggcataacattggtttcttgtcttcttttctctatagaaaagaaagcctagaaaacaaaaagaacaacaaaccagaagtcaaccagatagccaacagtgacaacaaggtattttttccaaaataacttctctgtgtttcaaaccgattctcttgcagtgtctccatcactataccgcttataccatgagagtgtcttaagtgtgatatttttttgtgtgaaatgtagaccctaccttatagaccccggattctgacaaagagctgactcactaacaagtcaccataagacgtggctattggagccatggactacttgttttgagttgcagttatgtggtcgggcataacccatggccacagctatgttagtatctccttagtgggtgtttaagtcagggtttttagcagacgactgttcccagagatgactgaagaagagtccaggtggtctaggaggcttcagggctgcaccagcaggcttcatcacacctgggacagcgctggatatttctgtgatgtgcttgttcattgaattgataaatgctgagtgacagttgcatggcaaacactaaactatctccatggagttcacagtctagctgagaggcaagaacctaaatgtggttatcacacagtgtatgtgcctaccaaaggatagagccatgtacagtgcccgctgaccatgacctgagtggcctatctcctgccttctggatgaaggagaatctccatttactatctctgcatggatgcgcacgtgtgtgcatgtgagcatacatacacgtgcatgtgtgtaagagccctcatgctgctgactggcaggctggtcctctggctttagccctctgaagtagatgaagtcttctccggtctctgttaccctaggttacaattgatgattatcaggaagatgctgaagacaaggacccttacccgccctgtgatgtgccaggtattatatgcggcagagaggcccagaagggctttcagtttggtatggaggggagggtgtcacacaactgaggccaccaaggcctcatgatcttcagagagcagttgactctgtgcttccctaaagtcagcggcagcacaggtgaatgcaattccaggaggcagaggaggaggacggacagacagacagacagacagacggacggacagacagacagacagacatagcttctgccagaacaatggctatgggatgtagaagcccaaaggcaagcgtgtctgtgactcaaaatccaagtttttcagcctaaaactgagcaagggggtgtagggaaacagccagacgctggggagtggcagtgagaatgtctgactgtggccttgttgtgccccggagggtgcctccttccacaggagcatgtccccacccccatacacatgcagcccttattctgaatgaaaagagaggctgttttagccacagaagcaggagttattgttaaattttaagccccattttaatgcaaagttgagaacaataacttaaacccatgtgcaatctttcacacctataaaaactgttccatttaaagtaggtgaagaggaagaggaggaggaagaggatgagcccgaagttcctgctggtccccgccctcgcagaatctcagagttgaacatgaaggagaagattgcgcccatcccagaaggaagcgccttcttcattcttagcaagaccaacccgtaaatactcccttcctagtcccttcaccactatctctctccaggtgactcttaaaagtgctgggtctggagtaaagaaaagtagttcccgccccccttctgatctctgaatgtacagggccccttaaggtcccctcctcctccttacctgtgtcaaccattcagccgcggggaagtgtcctgttcctttgggggtacaacagagtgctgggaggagcctgctctagaattcctgccctcacagcctgcatgggaacaactacaggagcctgcctagctcagtaagaccttctgggagggcctgtggctctcctgttgtgtacacgggcacactggccactctaggaccctttctgaacacatggatcttgttttaagatgctgtatggattgagaactctgcaggcaggttctgcacaacgtcttcattttcaggtcccatttaggagctcttttcccccctgttgagttttatggtattgctcatcacgctttatatgctatgagcagttgacttagcactctgatactgtgcttaaaatagcatttctcatagtaaaatgataaggtgcttaccaggaacgtggtaatgactcacagactgcgtgaggaagaagtctatttactagctggtttctaggtttaaatcatctgggattaagtgagctgccagggggagaggtggctcctggaaaggcttctagaggaactgcagaagtagttcttggccgtcaaggaggaacactgtgtagttcacaggcccagaggaggctcaggtgggaagcaaggcaggctggaggccttgaaacgtgacagtttcatgatcttttacaagattaatatgtcggtgttctgtgcagatgacaggaggacacatgtgccaccgtgcatcgaggggctagaagccactttatggatttggttattgattctggaattgtcaggcttcatacaaatctttacctgctgactgatctggcccacaccgatgatttttgtatagttcctcactgaacatccttaaaacaaacaaacaaacaaacaagcaaacaaaacccaaaatggcggctgtgaactgttactgatgcctgcagttcattgcatgtttatgtgtgtgggaggaatgggtccattttcccagaagtcaggagcatccctgcccccaggcctagctttggcagtgcgcaagtctttcaggaagtgcacagcacagagcagccacaatgggagacctgcactgaggggccaccatcatataaagtgattcttagttttggaaatgaaaagttacttgtccaagggcaaagcccatccatgttctttagtccacgccacagcagcagctgaccaaagaaaacgctgtaaatctgaatatcgagagggaggaggttgtaacccagccctgtgggacctcagtggagcaggagaggttctgataggccccgagagctgttgagaaagaattggatctggttgaaaggcacagcggtccttctcgattcccagggttgcaggattcagtaagaaacctaccatgtgacacaatgagatcctcacacgtaagcaaatgacaaggcaagttttgctctgccttctaaggactgcttgttgtggatcagctattgactaaaaaggtgacctttatgggcccctgagacggctcagtgggtaaaggtgcttgccaccaagcttggcagcttaagtgtgatcctttcagatgggcccatgtgaaaggagagagctaactcccaaaagttgtcttttgcatacacacacacacacacacacacacacacacaggagggagagtgagaaagacaaagaataaataaaagtcataaagtgagctaagaataggacatttataacaaactttccagacagcaggagacatcactaagtctcacttattacaggtcatatttgtaaaacagctgccctgtggacaaagatgggagtgtgtcccactctttgtgttaaaatatccttgagaagattaaattggacagcgtttagtgaagcacagaatgattcacagaggagcagccccgagagcagaaggcaagccattccaggagctgcggtgtggcgagagaatcatgggcagaacactgggatgagggggaagcagctcatctggccataacaccactgggccttactggagtgtggtctggttggttggcagcctgtgattggctgaggctcagctgtttgttaccgcagtgtcttcctaagttaggcctccagttagtagctgggttgtagttggttgtgtaggtagttactctagggacttcatttgctcagtttcctttcataagtcaggcttcatgctgtggtaggaaaaactaggggtagacatgcttggatctgaaatctacctctgcttctcagtagattcgttaccttaacattcttccatagccataaacctcagatgcctcatatttttaaactatttttatgtctgtgagtgttttgcttacatctatgtgtctgtactacatgtgtgtaatgcccacagaggccagaagagggcgttgcatcccctgggactggagttatggagggtttgtgagtccttgtatgggtgctgggaactgagctcaggtcctcttaaagagcagccagtgttcttagccattgagccatctctccatccccacttctggctcccatcttttggagggatagtaaccccatgtgcaaagactagatgcagtgccctctgtagctctcccagcacaaaacttctcacaccaaagtctgcctgtaggctccgtgggacaaattgtgggccatattgttcaccatgggtggaaaacaagagcaacatagacgccggccagcctcctcctgttctctcctgaaaaagcctcacaccttggaggaccccagcaggctccggcccttgtctgctccttggtccatgcggtgcttttctccacaggatacgtgtgggttgccacaagctcattaaccaccacatcttcaccaaccttatcctggtcttcatcatgctgagcagcgctgccctggctgcagaggaccccatccgtagccactcattccgcaacacggtaagcctctgagagaggagatgagggtgggaccaccctgggggtcagccccagcctgcctgtgtcaggcaccatccagacagcaggcccaagtgtgggaggcttggactagagcttcctgtgctcgctgtgtgtggtgccaggggttgctttctctggacgaagtgagtggagatgctcgattacaaagaagcctctataatattgctcgtgtcttcagggacttcttcattcctttcttcttactatggggtttcccgttccttactagaggcacactgatagctcattagagtcctaaggggaggagataaacttgaaaccaccctgagtaggttcaggaactctgaccttggctagtgaaagccctctcttatgtgaatttacctaaagctgcgcagctaccccactggtgagagacacagatcagggagaagacgtgagaccaagttgaaaggggcaacaggcggtagttacatctttgattattcacccagcgtcatagcttaaggatacacttctcattcaattttccctatcaggctgcccagagcctttaaaaaccaattccccttctcccccaaaaatgtaaaattcaaaggaagctaatgctggagaagtcagtgtatttgttgctattgttggatttgattttgtctcccaatggagctattttgagtatgaatatgttgcaaaagatcaccaatatctgagactattaatgatactatgttatacttgcagataggaacacgttgtcccctgaaagtctccacccagcagctgactcagatacagacatccacagcaaaacagggatagggcttggcactgatgtatctgtgttagaagatacttgtttctacattagtctttgcttcaggatctcttccctagcagttcatctaactcagcactgagcaaaggccaaagactcgttcagacagccatgggcccgttggccatcgcatctggatcttgaaaggcagtgtctgatgctgccgaggtactgcccgggagaggcagcataagcacagcctacctcttatgccagcagctcagtgccaggctttgtctcagtaaccacgccttcacgttatagctccccattccagttcctggcaaacctattggtgatgaaaggatgctctcaggagaatacggaagggacatttcccagtggctcagggagcatccctataaagatgaaggcagtgagcctgcctcaggccatcctcacagactcagctttgatttgagatcccccaagccatcttcatttagcatttaaacggagtggacacacacccctctgtccttgagctccatcataaaaatggagcacagggcaggagggtgtttagagactaatcatgatgtcacagggcaggggctagtgcaggttaagtgtgtcatcgtctctttcccagtattcagttccttggttttccttgtctttcgggtgtgtgctgctgttataacactacagagtttcattttagcaatagctgagtttctagtgacaaggggagtagaggccacatgaagaaagtacttaagtctaagaactgggattggcccctgggtaccacattagtgtggctgccaggtactttcagtgtgggaagagaggatgagggaaaggtgggggcagggggctgatagttgactagaaaatacacagttaggcaaagttgctctagcattgcctagtagtgcagaaatgggaagtttgggacagggttacctctgaggagagctcccctacttccatggaagagacgcacagctcccccttctgtggaggagaggtattgcatgctccagcggtgactcctataaaggagataacaaagccctcagactctggactacacccaccaacctctttgcctgtgactggctttgtggcctgagcagatgtccctgccctaggccaaatggtctctacagtccttccaacaccaatatcttcagttctttcaaaaccatagatgggctgctaagacaggtcagtagcaaagggcacttgtcaccatgcctggccacctgagatcacttcccgggactcagatggtagaagaaaagaactgatagctaaaagttgtcctctgacctttatacatatactgtggcatatgcatgtgtcacagacaataggtagatagatagacagacagatgcaataaagccacagcacacatatccatgagatcagcacccaggacaagcttgtgtactggcagttttgcctgatatctttccagttgagagtcatggggtcctcagcacactatgagtaagcttgttgcggtggttggacttcttgttcctggcccacttgccctgattctgagtcttagtggctctaaaaaaaatcaagaaccttgcgtcaggagctcagaagattttatagataataggtgacattttcaggaatgccaatagagcagcctatactaaaaattggaatgctacgtcagtatagtctttgcatggacccagaaaggccagagtcagccttgaaagaaagcagagtttacagagcgtggcaggaggaagacactaagtacaaatcatggtcacagactgagccatcccagcatatgtgggtgggttcaggacattacttgatgattacattgtccggggtggacaggaacacgtgaaattttctgacttcatttgatgcaattagcatttttacttatgctttttataattaaaaacagtagccatatggtgctgggaatagatccccggggccttgtgcttggttggcacccttgactccttcactgacattgtatttcttcaccaatatgaggcacagctagatagcagagcatttcattcaagttcaaaactgccaaaggtgtgtgagtctcatttatcaggtgctacaacccactgggagcccatgcagagggaagtttattaacacaagactttcagaaacaagtccctttgggtcacaataggagcctgggaagccagtcagccgaagtgggtaaaggaagccaggctccccaacattccttggtggttgcaaagacgagctatgggtgggcgagaggggtccttctgagtgtctcagccttcccatgggagcagcaggttgtcctgcctggagaagggcctctggacagaagctggcggttctgctcttgggcatgaatctggcatccttgggctgactgctgtgtgttgtgccttgcagatactgggctactttgactatgccttcacagccatctttacggttgaaatcctgttaaaggtaatacatttctccttgaccctcctctatgcagccacagcagtaatggttgcgttctttgcctcccttccagatactaggttatgcggactacgtcttcacgggtacttttgcttttgagatcattttaaaggtaacaggccggccagctcctctgacctcggcccctcctgtgcttcaagcacaggagagatgcgtgaagtgctttgagctttttttttttcttctgtgatcaagctgaacttttttaaactataggatttttttttcacctgtggccattccaacgtgtttttgcagtttttctttaactttgagtgcatgtagaagctatgttggcttcacattctagttggaattgcattttgttctttaaaaaaaaaaatcctctgaatttggttcactaataatggatatagcactctgtgtgaacgtccttctccccttcctgacatcagagtgagaagaaaagcacctgtgaggtggcaggagacactgtccccttgctcctgggactacatggtggcttctgtgtccttgaatagtaactcactactctcttgcaatgggtcttgcaagctatgctgggtctacttgtgtggagatgttctgtgtctctttcaatgggacgggcttacatttgcacagagcaaaggtgtatctgaatgaactgcccgtgcatggcctaccaggtggtgtcactgcgtgtgttgtgtcccgactgtgagtaccccatgggggagttccttcctgagacacagcagaggtctaggagcctccagaagctaagccttcagatgctgttgttacagccaactccttatgaggagaagctgggaaatgaagttactacagttgcctttgaagtattttgaggtttatgtgtgtgcatctaaaacaagttctttatgttgggcaactagggactgggctcctcacaaaagcttccactgacaaaaccccaattaaggaacacagggagttgccctgttgtggcactgatgttgccaatgcgttcaaaaccaccctttccaaatatgttcaaatcttataaaagttagggttttcttgcctaactgtaggtcagtgggtttggttttcgtttcctctacactggggctgagcagagcagtggccaaggcttacgtggtaaaaaaaccagcacaaaatgcgccaagtccctgctccaggttcttggtttttgccatttgctgcctctccctcaagctgaattagggaatgtgttccatagagccattagcctggttgattgagtttctgcttttctgtctgcctgtttgaactgttactcactctgggctttggcaaataaaagcctgggctatttaccactgttttggttttttttgttttgttttgttttgtttttttgttttgtttttttatggcttttcaagacagggtttctctgtatagctctggctgtcctggaactcactttgtagaccaggctggcctcgaactcagaaatccacctgcctctgcctcccgagtgctgggattaaaggcgtgtgccaccacgcccagcccactgtatttttcccaccagagaacttccttgttgagctcttcctatcatcagtagaaacctcactatgtgtgttgttgctaaacaaggtgttcagtgggaccaagactagcttggccgtaatgtcacccaacagcctgcttgctgtagccaatgcttagagagtaaccagagctgggagtgtgaaagccactaaggctggaaagtacatcaggagttctggctcccaccgagaaggttcaatgaaactcgtttgtgctctgtggccttagagccgtcagaccagcactgtataggtaagctcgggtgtgaagcagtgaaggccttcccacaaacatagtcaggagcagtccctccctacacaggctttttggacgtgccagagttctgttcctatttgaataaactctgaattggtctctttacaaatgtgcctacacttggctgcctctttccatctctgctgaaggaagttacacagtcactcagccctgctggtgtgcatctgtcttccttgtgtgcagccattaatgaggtcatacttctgccaagagtttgggaagagcccaggtttttgctcggttggttttgaaccctggaggggaggagagagaataaacgccacgcgattctgtttacagatgacaacttttggagccttcttgcacaaaggggctttctgcaggaactacttcaatttgctggacatgctggttgttggggtgtcgctggtgtcctttgggattcagtaagtatttatgtgtccgtagagtgagtttacatagggaacttagacctaatttgctcaggctgggcactgtctgctgattacagccagaacggcttaatttgccctgggccagaaagagctggggccatttgtattttcctatttctgttttccttttctgttttcttttttttttttttctttttccttatgcctactgctaggttgagtttatgattctcttcagaattagctttcaacagcagatgaaagaaagacagtttgactagtagaggacaaatagggttcttctcaggcctggtccaagacttcgagcatcctttctcagggtggcagttttccttcactgcaggcaaagcttggccttggtggtctcttgggatcccttcctctccctgtgcttgcaggatagacagctgcggtgaccttggggacacttaagagtctctggtgaagctgaacactgcctttttaccctgtgcagtacccggggcagtcacccgagtttgtgtcttctgtggcctcatttcactttctgctggcctgtgagcttctgtgctcccgagctgtcccatgtgtgcacacgtgtacacagccccttagctctaggaacctgaagagaaatgtaagccaggcactgggaaaccacagaactaggccactctgtgggaagaaagacagtttatttgggaatcaaactcctaggctgtatctgaggtggtcagggggtcaggccgaggggcagagaacatcgggctgcaggaaaagccttgtcagctttgtggggacaggtagtgataggagggtgggttcgggcaaggacagcctgagagttagcaaggggctttgttctgttataggctggtcaggtaagtcagcagctacatgcccattgtctgttgaccatggggacagataaaggaagtagcagcttttcctgactgactaaagcccgctcctgaggagtgctaagtttagggttttgtttatctgatgccagtccttctgtttacccagtcagagtccagcctgacattgtccctctggccgatgcctgggaacctaagctctgagctcatttcccggtagaaactccagactagtctcttcacggctctgagctgtccacactctttctggcttctcttctttgcacactcccccatccccaaggcctgtgctccagccacacccctacatctggggtgctgaggctcagctgcctcagtatgcactgctgctgcccccctctgtcagctaactctctgctcccttgggactcacttggcaccacctccctgagaggccttctcatctgcccctgtggtcacaccatatcttccccaccttggaggagcatactgcaattccccacccccacccccaggtgtgcgtgctcacccctcctaccggatgtagctacttgaaggccagaaaagctctggtaccaaagcacggttccccagacttaaacacgaaaatctagaagtcaggaacctagtgtttacatgaacataacaaagtttgaaaatttctccaaaaaggcaactgtaagcctaaaataggggctctgtcaggtcccacaggaggcaggaggcccgctttatggcataaaggagtagagagactccacacagttgtgaagtgtctttaagagatgatcacattaagcaactgctctccgggctcctaaccagctgtaactcagccgcttgcttgctttgtccctccttaggtccagcgccatctccgttgtgaagattctgagggttttgagggtcttgcggcctctcagagcaatcaacagagcaaagggacttaaggtattgaccctctctgttgagtggggctgtcttgggttggggatggctgcagttactaactgttcttgtctggaggtgaactgaggcctgctgggtttcagagtggaacaattccaccaaaagaaaaaccaaaaaggctgcttctgccacataccatcattctaaagatgaaagacaaaagactcagtaggtaagaacacttgctgagccttagcgcgagcacgagcatttgttcggagctgagtcagctcccagagcctgtgtaaaaagccatgcgtgttctcacacactggaaaacccagcactatgtgtgaggtgcctgagacaggaaggtgcttcctggtggctgttcttgctctgggttccgtgagagtctccatcttaagagtctaaagtcaagactgatataggaggacatgcaatatcctcttctgctttcctcaaagaacaggtgtgtttgtgggagcatgtacccacataacatgtactgctacacacacacacacacacacacacacacacacacatacacacacacacacacaccagaaattacttttttttgttaattggagatattagtttttataattacagtaattattgggtacttctttctcaatactttttcttgtgtttaagttgtaaatgttctcatgtggagtacacaccaggctggaaggtttacatttctgtaaagtctttctgggatggggagcctatgagcaggaggggtttctttcaactaaaccaacttctttggaggaagcccaagaaaggtgttttgggggctcagcaggttaaggcgcttgccactaagcctcacgacctgagtccagtccatggacctcgtgtggaagagagcagcagcttctggatgtcctctggttccacactcacccgtgcacagtgcacacacatggagtggataggtgcaatacaagattgataaaaacgtgcacgtccaattgaccacaattctcgcaccgtggattaccaggaaaacagagcatgaggttaggacagttagaaattcagctcaaagtgcgtcttgacgtagaggccctggcctggtgttaactcacctcacggctaaaaccaggggagagaatagcagccccccatcctctgtgtgtgttccttccccagcacgtggtccagtgtgtctttgtggccatccgaaccattggcaacatcatgatcgtcacgaccctgctccagttcatgtttgcatgcattggggtccagctgttcaaggtaggtgtgtgtctcgcccagggcgggagttgggttccgtaaggagagcctgtattgacgttctgtctgcttggtatctaggggaagttctaccgttgcacagatgaagccaaaagtaaccctgaggagtgcaggtgggtttcccaagagcagcctagggaattggatccagtcagcttagcatttcagaggtttctgtcaaggcctatcccctgagctcaggcctggaaggatggcgcttggtcttctgtcatttgtttatattttcaagtctaggcaaaactcaagtaaagtaaaaatcacgtctattcagtgtggtcagtcattgtttagtcagggcctctctcaaggtttgaaacatttttatcatcccaaaagaatgtaggtggctctaactccttagtatggagcctgtctgctgggggaaggagccctgaaataagtgactgagggccacccagtatctgaggaacgtgaacggtactctcccaagtcaaacttgcagctccactcccagggctcaggagtgggctgccctcttctggaagacttggcagtctttgctccctggtcctattttgattcttacccatattatggcacatttctcttcacaaccgtcaacaaaggagaagcagcaagaaatgtttgcatatcataattcaagatgctcggcaaacgtggaattttcccagtccatgcatacgttacccagagcttatggccacagaaactcatgtccttgacctttagagttacatcctgcaggggtctagctgcctgccccgtgtgctttggtttgggcttccttgaataaatgacgtggctgtggggtgtcaggtacagtttgtctttgactacatacatcttcaaagatgctatcagccccgggcagggggatgcagagcaccacacaagttgattagtgcagccacagtgtggctatgcaggtccttccctctagctgcctgttgttaggaaatgacagtaacgggctttatctctgggctccatccacaagtacagttctgtaagaaatggtgtgtgacagcagttacagaattgttttggaaggaaaattggtaatatcaatggtatgtaaaggaagagatttgttgaaactagattgtggacaagcagataccccagcttgcttctcaagagtttatggaattctccatggccaaagtattgatttttccacatgtgttcccagcctgtcttatgtgagaaacaagttaccatttggtcagagctaattgccaacgggtccacactgtttgtctagctgttcctgccccagagagcctactttacactagacaatactagggatttatttgagctatagagcagattaaatgtgggaaaagcaggggagaaactccacctggcctgtgctcaggtacatggcctggctgagactacatgtaatgttctagcgtgggactaatactgtcatgcgtgaagccaggatgactctaatgcctttcctctacagggggcttttcattctttataaggacggcgatgttgacagtcctgtggtccgtgagaggatctggcaaaatagtgatttcaattttgacaatgtcctttcggctatgatggcgctgttcacagtctcaacttttgagggctggcccgcgtgagtatagagaatgttctatttcccacaaggtccgtatctgctccttagcaactccatgctgtcttccttccttgagcaggtgcgacttttgctcttcacagctagtgagctagcctgtgactaacgctgggcaaattgtcatcatttcttgcccatcatggctcctccatctgaacaggcaggtgttaaacatctgcgtctttcttctgggaagtacctgggcagcatctctgggtgtggttaaagaggtcctaagagacatttgttgtataaacttctgttggtagctgcccttctgatgctcttaaagaggatttgacagcatccaaactgccattcactcttccactcatcttgatacagaatgagtattcatgtgtgtgccagccatgggcagttgccacttttctttcatggaggtgcttatacattcattcataaattacgcctttgttgtaaaccccatgcaatatgctgtgctagacaatgtggaagatctcgaatgtttgaggcactgtgcttgctctgagccctgagcccagagctagtagaaatgtttcatagacatacttagtacagaagagaatctggatgcgtggctgggatctggctgagtgtggatcccagaacataaaaaagaaagaaaagaaagggcaagaaggaacctcggatatccttctacctttcttcacatgccccatgcccagaggagcttgaggaggggagtgcccaggctggttcttgctggctgccagggttcagttagccactgaggcagctgacaggatgtgaaccagcctggggctcagagctacagggccagagcctagccctggactctgctgctgagcattggtgaccttgtgaccttggcactcagatgcctttctgaccctcgataaaaagggagtggtggtgatatctgccctgctagagagaagtaaagatgaaaggagaggatgtgaatgcctttttaccatgggctggggtcctgggctgcattcgagtgggctagtctaagttggggtgttttatggtggtgcccttctccagagttctgccgtatgttggaactttctgtttgggtgcagggtatctgtcagttcacacacaattttcagttccttcagtatgtcaatgtgattcactttatctcttatctcttcgtgggaggttgcattgctgactgtttgtgaaattcttttgatttctcagttctccagatattctttgaatgattctatctgggtaacctctcatcaacataccagctgtctgcgcctgaggcctaaggcctcagtgacccagctgtgttcagaggccttcatgtccctcccccaacacacacagtgactgtgcagatgaattctgggagcatcaggcagtgcagtgggctgagctacttggactgtggggttgtggggctcttacctagttttcctgtcctccaggttgctgtacaaagctattgattcaaacggtgagaacgttggtcctgtctacaactaccgtgtggagatctccatcttcttcatcatctacatcatcatcgttgccttcttcatgatgaacatctttgtgggcttcgtcatcgtcaccttccaggaacagggagaaaaagagtataagaactgtgagctggacaaaaatcaggttaatgtcatacactgtttgtgcttctgtccctcatgcaagagcagagcacctcctccctcagtggccttctctacccagaggagagggctcaggccctgttcagagcacactgtcagccacgttgagtctctgtagagttagtcaccagacacagactagactattactggggaaaacaatccccacgcttgtgatgagtaattagagaatgctgagggtataacccatgatggtggctgaccggtgatggtttagactcttgtgtagtaggtaatgtggctcagagcaggagttcactcatgtaagcttccacagtcccctatggagaggctcttcagcatatactcgctataaactttcttcatctttgtgttcttcatatagcgagctgctcatttgcatttgtgcttccaaagcgcaactgtagggcaggaagcaaaatccgggtcccctacccactcaacacactggaatctatttcctccagtagggaaagaaaatattcccagagattgcaaggtgtcttttagggaccacaattgccttcaactgaaataggctgtcacttgataggaagagtcagaaactttgaatacggcactaaagttgttggcttcatttccccttcttgtcttagctgatctggtagaagtaggagccttggctctgactatgataaagccaggaacctgggagcctgttctctggccctgctctgctctacctgctctgtgacgttaggtgcagctctgctcctagggtcttgtccccttagcttgtttagaaataatttatgatggaaagaaagaggtgcccctagacattcttttgaacctttagcatatgagattggaagtctcttctgagagactccccactgtcttttgtaaggggcatctctgcttttatggtaactagatgattgaggttggtctgggagtgcatgcttattaaagaggtggccatggccttaggaggtatctctgcccaagtggtacctgggaatgtgaagatgggtgagttgacacagtttgtggaagaacttttcctatgccagtgtgtccttgtatacactaccagtgataatctgggggaaatctggcttatctctttgcctacccaagtgagggtatagccaagtgaactatgcaggggtggtggtgtctttgagaaccccaagtcccaaatagtcttgaatatggtgtctctggagtcagagtgacactgagtcacaaacacagaaaacttgtctgaagcctgctgtgtctagagcacagatgtgggggagcagggcagggatacgccttgagatcaactggaggctccctcagggccggctccagacagagactagtgtccgtccctgagtgagtagaaggacagtgttctgtttagagccaacctcagttcgacctacccttcattactaaccattctctggagatgctcaattgagtgcagtaagctcccattcccgtaagcctggacaggcatcttctgtggatctgctagagtatccagagagcctccaacctcaggaagtaaactcagcctcgaaggctcttgaagatttcatgcctgccactaggtggcttcctcttgtggacgacctggtatcaccacctgctgacagagaggaaaggtcctaacaagacttgcttgatctaagtccccccaacacccacccctaagagaccctgcagagcctcagcaaaatttgcctgagttgtgtctacaggtcccagccagtacagtggctgctccacttacttctgaagtcaccgtgaggcaaatgctagattctcctcaagaccccatggggcttcttcactgctgctcatggtcacttcctggaaggccagagtgagctcttcttggaagatgccactatgtgctccttccctggaagctctcaaaaccccctcggttttttttatcatccttttctacctttgcagcgtcagtgtgttgaatatgccttgaaagcacgccccttaaggagatacatccccaaaaacccataccagtacaagttctggtatgtggtgaactcctcgcctttcgaatacatgatgttcgtcctcatcatgctcaacacgctctgcctggccatgcaggtaagaacggagatcatggcgggagccaggtctaggtgtgccccacgtcccctctaccccagagcccgacagcagcatgctgcacctcctaggagaaggggtctgactttctgataatcctggaccagtgtggccagaggtctgctctgcctgactgttgtcacggcagacacataaggtcacgtttctccgcctgggcagatggctgtgggtattgctcccatggaacctatgtgtgctattcagtatggatcgtgggacccaagagcaactgagtaccaaagccccgatgccatgcagacctcagcttctgccctggctctatccttaccagctggtggtcatgagagccttacttcacgccacactgtctttatgagtaacatgggagacctgccacatctacctcagggcaaaggattccgctgaattcttcgagtctggcactttgaaattaattttagatattttaatttaattttacgtgtgtgagtgtttgctgccatgtacgtatgggcaccatgtgtgagcctggtgcccacagaagtcagaagagggcttctggaactggagttatgggtaacggtgagccatcgtgtaggcgccgggaaccgaacccaggttctctgtaagaacaagtgctcctaaccttcaagctgtctctctagccctaaagtctgacactttggtctaaacctgccccagcggcactaaatattgaaaaggaaaaccgaaattacattcctgactttaggggctcctggtgcggtagtgcgtgatttcctagtttttgcaatattgccctgaattacagcaacttcttgctgatcctgaccaagtcagattgcagagcagtgatgacagtgaacctttaagaagttattgtctgatagatatgacactaggtcaggaagccaggaccaaggtctacaaccagattctgtccaggcttgaagaacttaagcaattcaaaccctccgtttctcagtagaagccaggcccatagtcaagcaacattttcagacactgttttacactttataatgaaaaggtctgtgtgctgatctgggggagagtgtgaagcccagtaatactccctttaatgagacataaacctaaatagtataagatttatcactactcaaactctacctttacccatcatatctgcagtgtgttagacaaggacctgagagatattcccaacagagaaagggtggcttccccttatcctgaactgaaagaatgggcatttatttcctccatcatcggaacatcctcattgtgtcatgaaccaccaccaccccccacaacctccccatgtttaggggaagttcaccatatgacctttgcagtgtactggcttgaatgttggcagaagatgctgtacaagagggtgggaaatgaccctggggtgcaaatgtcaggggatctcccattgcacagatgagatcgtgaggttttgacatcagtacctctgccttcatccacagcactatgagcagtccaagatgttcaatgatgccatggacattctgaacatggtcttcacaggggtcttcactgttgagatggttttgaaagtcattgctttcaagcccaaggtaagttgctggccctgctttacaaaaaagaagggcctgcttcctttcagcctcatgttactgaattatgctaactcttctgctagctaagtaggctaccatctgagaacatcaagatctgattaggacgtctgtatacatgtgggaaaataaatgcgcaaaaacccaaaacccttatgaaaacagttctgagaaaaagagagaagagaattaaggatctgtaagctgatgatcattgtaaaacctggttttctgtgtctagaatggtatgtcatgctgtctcaggaaagcgtagctcattatctgagcactgaggggttgtctgataatcatcagaaacaattgaccctgatttcactctgagatctctagcaggaagacagcttctatttgttgctgtctgcggcatcctttttttttttttttttttttttaaccgcgtatggaaagttctagtacctcttactcgtccaccatattttgttgttgttgttgttggatttagaaaagtttcccttgcttgtaagaaaatgaggcatgacccatgctacactatgttgaaggaatgcgcgaattgcgtcttctttgggagggatcagttctgtcccacgaagcctgaaggctgtgatgtaacaaaccatatagctcggcatcaaagagcataattgtgaggcatctgagataagattctgctggtttaaatgagttacttcaccgcccttttagctttctctctgttctatgaggatatccatagtccaggtgtaggggccgttacataccgtattgaaagggtgcctgctatgttgtgctgtactggagaccattgctgccacagttacaccgtcaccaccatcttcaagcaatggtatgccttcagtctaaagccctagactgaggagctgagctgagctgactagtggggtctccttcctcgaatagaccatgactctcagaagagagaatgacagagcctggtcctaggtgttttcaatctgtgtggaggtagccaacaaacacggcttcagaaatggttggtttcacgtacgctatagttatacagaatttgaactccatcctgggcctttctttaatttgaagtaaatcttaggcaatctttaatcggatctttgtggaccgaaaagaaaggacattttgtaagtgattaattgcagtgattgcagtggggtcaaatttggcaccttacgcatggctagatgttacgtactgtgacttgtccatacataaacattccctccttttccaagtccatcagatcctccttggagacttgggtttgcttctctctctcctattcttctttgaacaatatttgtctgaactgatggaagaggttgcagagcgagaatgtggaaggttcttgagaaatgtacatgagacattcccatggaacatttcccatcaaccctgtacctggcaataaagctctgcaaggtttgagagcttgtccaggttgaggagaacacacacacatcccacagcatgtgagcatgtaagagtgtgtatttatttgggtgcatatgtgtgtgagtatgtgagagcgtgcttatatgcacatagccttgaaggctactacatcagtggcttggcccttttatccttggtccagtgagtctctaagcctgggaagagcactcagggtcacgtgaatggatgagcaatactgttggaccatagaagctaatatgcagtcagtactaaaagaccagagtttttatcaggtggttcctccagcaagtgcactgctttgagttttgcttaacaagatatcttcatggcctcatatgacctcagattgtaatccagagaacctttaaaataacagcagcacccttgctcttggtgagcagtgtttcaatgatgacttatattgctttgtgcatgacaacggaaggagaacggagtcgccaagacatcgctctccctaaagtcccccctggcctttaatacactcagtgcttaccagccaagcccagtgagaggtgctctcacaaagcagccagtaggggtacctctgtcctagttagtcaggtctgaaggctacctctctacacttagacagtccaggactcggtggcagccatgtccagggtaggctttcccacttcagttggcccagttaagaaaattgcttgaagacttgctaacaggacaacagaatccagagactttctcattaagatcctcttcaccactgagtctaggttatatctgattgataattaaaattaactagtgatctacagactgagttacgggccagccagaactatgcagggaaatcctgacttgagaaaaaccaaccaaacaaactaaaaactagctagcatactaacctaagtgtcagattcaggaatatttctgaatattattataagctgttgcatgaggctaactcactcttttcaagcagttagagataaagaaaggaaggcagacagaaagacaagacagaaggaaggaaagaagaaagaaaggaagggagggaaggagggaggagggaggaagtgaggaactggcttcagagttcagttatagaggagtgtgtccttcagctaggagggtgggtggggatggacgctgtgtgacaaaccatggtgtctttgatgcatgacgggtcgaggagctgagtcatgctaccaaggtagtgatttcaagagataggaggctgctaaacagggaagcactgtgtgggaagaaggggtggctggcatttctgccccccctggctcctatcagtgccacctggcccaagcctctgacaccagccacttgtaccacgaaacctcctgtggtgtagatgagagactatcaacctgtagtctgtgaactcttaaggatctgggcaccattttgaaactgtgaaaggttttcttagtctatcagatttccaaaaagttcccagcaagtgtcaaatccttatcttgctgatttgaagggattgtatcccccacactgggccaggaaaggcttcatgaagaacacagacaggactggcccatggtgggaactctgatcatagtggagacaaaaaggagctacaagaggaggtgctgcgcaaggccccgaggcaggtggctcccttcttgcagatctgtcaggcaagatgagagaaacagagcttgtaatatagggccagtcaggaagtgagggaagggggcttaatctttgaagctccatgagtgtttttgtagtcttagcattgagttgaggaacagaacacactccactctgcaggagaatctgtgaggaaaaaagaacaaagcaaaacaaaacagagaaggacatgtccatcagcatagtctgcagtgatgctgccagttacagaactttttggtactcgcttgcaaccgtataatctaagagtattctgtgatgctggaggtgtaccatgtgacccagctgccctgtgtgtcagaagactaccttgggagcggagcagaaaactctcttgcattctagactagctccttatcttgcctctgaccacatgttttacatcacaaatccatacctcagggatgcctggtttccctctattgggaagctaagaaggtgtgacctgttcttctgagcaaacattcctgctgggtttgatgcaggacaattttgactatccttgaacttcagagaagtgtttgagtgccagccactgagggagcaagtgtgagagacaccatggatgtaaaggagaaagagagtagatcagaagtcactgaagttgaggctgggagtctcattgtcagtagtaacaaagggaacagtaagagcagtaagcctcagtcagagtgaatgccatcctgctgccaaaggatgggagcgctgttagtagtaaacagaaagaaccccactctggggttaggcgtcaacacgtctaccctttccacagtgcaataaaacgctgtgggtctgcagagacttcctctagccctgcagttgttcataggttccaggcctcaacacgtcaaactgaacgcttaattcagctgtgaggatattcactgtacctgtgctgggcccctcttttctagaattcagacctagatctttattcttaaaacatgtgctgcctattcaagatacttatagacagaccttggcaggacagccctggcagcggtgagcctgtggctctgtacagactgtacccacctccttcagtgtggcttcccaggggtgtcaggagtcaacaggtgccagctaggcatgtagtgcgaagagcctagaaaacataaatacacatctgaacttgtaagtcacaagtatattagaactgatacaagatactaagacctaaaaactgataaccaggaaaaactaggatacagatttgtggagaaggatgtgaccatggtctgggtgactgacagggttgacagaggtgataacagagtaggctatgttgtcctcatcctgggaagctttggtgtggtggaccttctggatgaaggaagatgtgatctgggaaaatcccatgaaagactggcacttgtctgaccttagaagaggaagtagatctgagctgattgtggtcagaggggttgcacaggtgtcaggagatgggaaagagccagagaagttgttgggggaatttagaggagttcgcttagcctggaagagggaaagaacatagaaaaccagggagggtagaaggcagccattagccattagctgactgggatccctgacgctccctcttcacccccagaactctttctcccacagaacctgccttggcttgtctttagtccacaatggagagtttctctgctgcggggctctactttgaagcccggtgcatctctgtacctgtctctctataggctgtgacctttagacgagcccctttgtgtcctttaagccaagagctcttaggaatgctgctgcacctcatagcctgatatctttgctggactagtgaggagggagggagactgctgacctggtggcttcaagtgggaaaagggacaagaggggagcttagagactctgggaagtatatgagagtcttactcttccatcagctcatgagggtttggggtggatgccaggacaagtttaccatctatctacccagggccataggtctcgtgtgtgtgtgtgtgtgtgtgtatgtgtgtgtgttcatgcctatactcacacacatgggagcatgaccacccctctgtgcccctttctatcagtggacagtattgttgtctcccctttggctttcctggcccctcccctggttgtcctggcccctcccctggttgtcctggtccctcccctggttgccatgggtgccgtggggactcggatgtgtcccctcatatgatccatgtgatgtgcccttcataagcgctcataaacatctgcccctgcctgctctgtccaggggtattttagtgacgcctggaacacgtttgactccctcatcgtaatcggcagcattatagacgtggccctcagcgaagccgacgtaagtatgcacctgtgtggcctgcgtcctctctctcctctctgcacattctgctccctgccctgatgtggcatcacctggacaagtcacagatcccagtcacacatgattggaaactagacatttcctcacagaggttgtggaaaacaaccttctagagtagagccttagcctaaaggcctctgcagacataaatcacctttgcagggctgactctggcaccattgaccccaggcactagtaggcaaggtaagatagggtgtctctggttgtctccatttgctctgtcaaaatccatccaaagtgacgttatctctgacatgtttgtctcggggcagtttttcaagtagtcgagtggcacattgttaacgctgtccttttcttctttttttttcctgttgtgcttcctgtcttctgtggcttctgaatgcttgcctaacagcactatttcactgatgcatggaacacttttgatgccttaattgttgttggtagcgtcgttgatattgctataactgaagtgaatgtaagtagccaaccttgtgtcccttaacgtgattgctttcgttccgtctgacgtagaagagactagcaggcccacccgtgaatccccatgcacacagaattatagacactaattcactgtggaagatgaaagtcagttaattagtggtctcttctcccttgccctttctttatcccttccccttaaggaatgaagacataagtatgaagttgccactttggaactaaaatagttatttttaagatgtcatactccatcttttaacaatgtggccttgtacccacagggttctgggatggcacaggagatccctatagctgtgcctgactttgagatcattactgtcattgtcctccagctcaatctagctggtgactctggccctccatccccaaagagtgttgctggtgtgttccaggagagagttataccctcttgtcgcgttcagtttatcattaacaagggagcacatccataataggtgaggcaggctccaccacgagcagtctgacaactcaaacatcagagtttgagaagggaagtactggcttgctcaagtgaaggcccaaggcaggcaggaaagggccctgtccattggcctgtacttcgttcattcgcaggctttagtggatgtcagtgtgtgtactcctcaaggtggtggggggaagtgccgctgtgtgatgttggcttctgttctgtgttgccagtccagggctgcccctgccacaccagcgctctgctttgcctggctgacatatgcagggctgagaattgtcaggttcatcctggtgcccagactccctatagggaatgggaatgttggtgctccttgatgcccctctgataagccaaggctgactttcgtcagtatggatgattggacagccattagcctggaagttccagccccacttcagccttgacttatggaacccaggcttcatatgtccatcagagtgacaatatcttctgggaataaaatgatgtagatatttgtgaaaatacctactaaaacaaagggttatgaatacacactattatttatgcaaatttcctgtttactatgcaaaatggactgtaagatattaccatgggcactgatgtatgtgccaagatagtaaggtgacattttgctaggtctgggtacacataccccccaacctcctaaagcccagactgtaaactcaactttatgagacatattctataggcagctgtaaaattgtcactcatggcaagtgaatagctttggttgtaaaatgatctgttcttacttcaagaaccctaccttggctgctgtgtggcaagatatctgactgctttaattgtcttaaagcatttgaagtatctgtaatgtgtgtcagggaacctctcaatggtcagaaacaacttataacagacgttaaaaataccataagctagggtactaatagattgttttaagtgctatgagccgggggtcataaactattttctgggtaccaggatgttaccaagacttgtctaccagctagacccagctttctcgtgctgcccacttgctggctagctagtgtgacttggtacactcagaggcaacaccttcttcatgggctggaagctggccctgctcttcaactctggcctggccttgcctgtcagtgtctccgggtggttgtgcttctgtgtggattgggaaggtctatgtgtgcatgtctagttagcagtttacgtcaggtgtctgtgcagggcctcattcatgatagccaagttctcactgaagacacacactggggaatcttcccagttcccaagactcctgtcaatcactaacctttccctgactagttgtactctgagaccaaacactccttaaccttggcttggtaactccctagcctgtgttacctgcaaagatctcagtgttggcccaccgtctcttgatgcaaaagttatgctccctgcacatttatcccatcttcaacatcattgttactgggaatccaccacttgtaggcctggagctaggctctggaaataaccaaaggttaagagacagacagacagacagacagacagaccattcttaacctctgatattataaatatgtaagaatggggatgtttatccccatatcctccctccatacgtacctagttccccaggagagggatgcatgtcatatcctcaatggccttgtctcctgatgtccagagtcaactgagcatgaatatccttggtccttggtccgttgttggctggtttgagttgctatcataatatcatcatcatcatcaccaccaccaccatcatcatcatctcatcatcatgttttgtgatgtttaacctgccacactctctcccctagactgtcgaccttccttttccattgcctaattgatttttcatgttggttttatttttagaaaattgtagcggcaagtatatataatcatatatacggtgaagtctttaagcaaaagcgcttctagagactgtatactttgtttctgcttcccacttttggtgtttcactgagttctcacaggacttgctaaggatcaaccatggtcaccttgactgtttcttctcccatatgtcctggtccctggctggggcctcagctccggcttgtttggtcagtcatattggttctgtgactcaccaacacagccttccagattgagtggtttggtctgtaaaatgggaactctacttgtttgcattttttgtaataaaaaaaaagggggtggtggggggtggccctttggccctttgcattgtcctgttcgcatgctcacccagatctttgcatcttgatgtcttcccatgctccccaccctatctgttcgtggtgtgatagctttctggacctgtccccttcacctttgtttgtaatgccaccaagttgctgactgttgaatgacacctgatagggctgactttgctttctctttgatgcctgtttgttccttgagttctgaaatgatcaagcaactaatgttctgacccaggcagggatggttgctgctgacactccgtctcttgccatcccttgttgcctaggggaggagtagtcttgcttcgcgtttatcaaagaacacataaaaaccaacaggaactcactcccagatcctaggcattgatgctgccctgtcacgcgcccagcttagaccgaggcgtcaccatgccattcagtttgtagtcagaatgagctctcaagtccatatggtggccaggaacggggctgaggaatgtgatcttgcaatagcaaaacctactgaagctatccaccccaaccctctagatgcccatggaattctattgaacatggatcacccagttcctcgaggctattctcgaaatgacagtcaggtagagagccagtctttgccctgtcccatgtcctcaagggtcacctgtgggtggcctcagaagctgagcagggtcatgtgacttgcacaccttgcccatgctctgctctgtctgtccccagtgcccctctggccctcagaaaggggacagatgtagagtttaatccctggaagccaatttctgtttcttcatcaactctagaagcccctgtaacagctgtgacagcccaagtggtctcttttactggtttcactctctgtgaccactctgcaggtgtgagctatttgcagaatacttgacctgacattgatgtggtctagacaggaattctccattctgggagcacattagaataacttactggctttcaaagttcctgaagtgtaaaaggacccagattcatttagaaaatcccttttgggtggcccctgggcagtgggtagctttagagaataccctagggtcagaacaactggtctctgtgcagatggagcaaagccatcctagggtgcttcaagtgtggaagatactttggcaacttgcatggttcccccactgctgccagatacattctcccctctagcaggcctctgccctgggaggtgtggtggcgggggcagtgtctcaggccactctgggggtgcatcctgcagtgctttggttttcattccttgtgttgtgtggtccactgcttttgtttcctgaaaaatgctatctcctctcctcctccttaaaaaaaaaaaagacaatttgactaggtgttgtggtcgatacctataatcccagtaagtaggaggtagaggtagctacataatgaatttgaggccagcctgggctacataagaccttgtctcaaaaaaaaagtttagatttaatgattgatgattgtcattcttcagataatagtttaaaaattgcacatttcaaaagtcagtttagctaactttcatcagcacaaaggaagaggatcacaaatggcctgtcatggagcagcacagaggatggagccgaagagagtggccagaaagagcaggcgtactagtgctcttacaggtcccacatatgttgcaggtattttggtaccatagctgtagagggctctgctcttccttctccagtcctcttagcacagacaagcagaggtgtccacacatgcacctacccagtcagaggtgtccacacatgcacctacccagtcagaggtgaccacacatgcacctatccagtcagaggtgtccacacatgcacctacccagtcagaggtgtccacacatgcacctacacagtcagaggtgtccacacatgcacctacccagtcagaggtgtccacacatgcacctacccagtcagaggtgttcacacatgcacctacacggtcagaggtgtccacacatgcacctacccagtcagaggtgtccacacatgcacctacccggtcagaggtgtccacacatacacctacccagtcagaggtgtccacacatgcacctacacagtcagaggtgtccacacatgcacctacccagtcagaggtgtccacacatacacctacacagtcactcacatgtgcacagtctgctgtctgagcaatagtgctgcctcctttaccacagcccttaggaagagtgatgtgggggacaagcatcctgggaaagtaacccccatggatagtaaagccttaagttaaaaaacaataacaacacccgccccatgatcagagctaaggatagcagctcacacctgtaaccccagaacttagggagtcagagtttgaggccaacccaagctgcataatgagaccttgctctctgtctaattaaaacaaacaaaacaaaacccatccctttaaggaagagctacttctggggtgaggcaataaaagaatttgacaaaaataagcctgggttctgacatgtctatggcatgttttgaatatatatatctcctgtacatgttcctgttctgcgcatccaggtagactagagccctttccagtggtcagcacctgctcttgggtaccttcgctgctgaattacaagtatgccctgatgtatccagagccattttcttcttactgaagttcctagcaattcttgtttggtctcaggaatcagcttaagagccaagcctttcttctcccatgtccccagggaaggaagctcctagcagcgtacctacctttgcccctgtctagttatgctgtgggccacagaaagcctttgttgggaatcaccaacagaggaacctgtcctttgtcagtctcaggaagactcactgcctcagtggaaaaggcacttggtggcaggggagataggagggcctttccccattcttgctattatcttttcaagatgcctcctggcagggaaaacttgcctctagcatctttgtatttatttaagcaactccccaaaaggactatgctgagcattgagtagagtgaagaaggagaaacaacctccgtggagataggagaaacaaccattcattgacatacacactcagacctgggtgaggcaaaactgctggggctcaggcaagctgggccatgctgttcttccagagtcctggggactagagtgtgggctggctgaggctgaattgcaggctgctgcagagaagcctgcctccatctcttgcactaaccaggcctctagtccttcagcagagacatgtatcctctggagcacatataatgctaagtgtggggaccacaggcagagccactgttttcctcatggttagagttggtccattgttccaagccaggaggcctgctgtaaggtggtcggctactttgaccaagccagagaagcaaggtttctctgaacctgtgtctttaaagacctcaaagacaagaaccataatctttgagcaggcatcagtctccagagacatcacatccctggaaagaaactagactagaactagtgtgtctgtgagtctgtcagtgggtgttgtccactccagtctagttccagagtgaagcactggtattgtctcagggagggagcagctgtgttgaccaaccactacacactggtaaaggggggggagtatctcctagccattgccgccttcccccaacattaatacatctcaatctttgatttcttaaagccatctgaaagtgagactatccctctcccaactgccacacctggggtaagatcagtgactggtcccaggggctgggccctctccctgactttatttgaccatgtcgagttttccactggtgttctgtactctccatggttgtcccttccagaacagtgtctgcagtgatttgcattcatcatccgtgtccagtactcttgagcagcccagcgttctcctctaacacagtagaacacagggacatgcatgtgctgtgtggatgcagtttgtcccctgagcccctgtgttgttagcatgtgatttttttttctttcatgccatgctttctgaggtgtaaggccccagaaacacgtcttcagttctcacctctgtcacctttgcgtccgtcgctgtctttctgaaagtgtcccatgttctgctttccactgggtttgacctctccatgataacccttcagaactctgaagagagcaatagaatctccatcacctttttccgtcttttccgagtgatgcggttggtgaaacttctcagcaggggggaaggcatccggacactgctgtggaccttcatcaagtcctttcaggtaagagcaacctagggctttgctttctgtcctctggcccagaagaccccagctctctctgtctgaccactgagtcagcagagattatgggaaactaaacaagaggcagaaataagaccctgaaagtcagagatctgcaatggtttccatatggaagaaatataaatctcaaggacttttgactgcccagaatgtctagcaacagtagtgtccgagagagggaaggtcactacacactccctgaggcttagtagcctgttttagttactgttatattgctgtgatctaggtaacttataaaataaaccatttaattggggcttattttccgtttccataatcagcatgacaggaaacatggaagtaggcaggcaggcaggcaggcaggcaggcacgggtgccagagaagtaacttaaagcttacttcttagctgcaagtttataggcaaagagagacagacatataaacacatagacatatagactaagcctgacctagacttttgaaacctcacagcccaaccccagggacacaccttctccatcaaggccacaccccctagtccttcccaaacagttccactaacggggagccaagcattcaaactgtgagtctatctgggccattcttattcaaatcagcacatagtttctctcttagatagattctcaacttacaccagattactgagtgcttggtagaattaagagttcagttcatctaggtatctaccaggcctatgatttcttagattgcttctagtccatttgagagcagagccccttcttcttcaccacctggcgcctgctgcagattttccgctcgtctagactgaaactgtgagggtgaggaataaatacagatgtgtaatcaaaggcacaactatgtagggaattcatagccatgacccttcacttcttcatcagctgggtttcattcatgattcaaatgttatgtgaacaaatgaaattatataaagaaaaaaaatcaagttttccctaaccccctctgggataaccagtagaaaatttcagtaattttttttttttaagtagggaaaagggaaagagatggcattgagagaaaggagaagacagaaaaaagatcacaggaaggaaatcacagccctgttaaggatggagactgaggaagaagggtgtggcttaggagagacagggcaagcgccataggcaagagaaccagggtgtggccaagccctacagccctttgtggttagtccacattccagagatgaactgctaggataatgggatatattcatgcaaaacaatcttggttcttgatgaaattattaaacttaagaaaaaaacctcataagtaaagaagccatgtgacagaatagtgatttgttctgagacagtcggccagcacattcctcaaacatttggatgtctatgaagaaagtgcagagagtttttgtggggagaatagccctgtgggaccccagtaagcattccgtctgtgggcatagtgctgtaacatgggccaggctgtgtgtcacagagtcccaaacctctaagtatcctgtcagcattctgatgcattgtcttagactggtgagaaagctgattccaatcagctgtgcttggaattaagcccaagaagagcccaggcagccctgtgctaccatgtacatagatgcatttgtcatatgtgatgatggagaaaagccatcaaggaaagaactcagatctggccagacacatctactttacacaaaacatacactttacacatgtactctgctagcttaatttcttcctgggtccagcctgtgagtttgtagctgttttcagatgggtacatggttcagctaagagcattaaagagagtctcagacacaccaaagtgcacccgaggtgtatcaaggaaaggaagcccagcagttagctcccttggatgagtctgaccgagagtaaccttcaagtttgcagtctccatgtttttccctgtcttcagtctgtctgtagtttgtaattgctgccttgtctgttgtaaatatctgatctgtcctcatgtcttgtcatccctaaggctgactcatgttctactgcccctaagaaagggggctttgctctatgtttactgagcagcgtagagagcatcacatgcaataggaatgaggcatcactttgcaaacattttcaagaattttataagagactgagtcatttactctagaccccaaagcatccagtgctacaaacacaccgtcactgttaccaagttttatctggatgctgatttcaccatttaaggcagatatttgttgtataagattgttttcagcatttactactataatcacacacacacacacacacacacacacacacacacacgagttgctttttaggttaggggcataaaagtgtcagttataacttattatagttatgcattatcttaggctgtaaagatgattacataggtaatccaaggcaagtaaggttggttggtacattgttatcttagggataagttaaacaaacaggctgagtgcacagcgggattaagagccaaatgacctcaaggtgtacaaatactgaggcccagcagaacctgcaggctctttgaacgtaagagacattttcataaaaatgtatcgctaatggtgcattttgaagtgtttttgcattcttaagtggtttttggccctctggctccttcattcttcttaaagtcgcatcgtaaggaaaaccagaatgtaggttattttgcataaggatgtttcccagatacagcgcagatggaagcaatcggggaatctggtattttagaatgacttggtcaagtgcagtttcctgaaggctagagagtgcatttaagactcactggatatgtgtgtctgtatggaagaatgtttagggttagcacagggtagcacaactcacttggcgagcaccccctgcctgcctacactttgtgatgctgggtatgcaggtggtgctagtctgggcctcatgagttgttgatccagcacccaccagcccgatcctttctgtcccacaggcgctgccgtatgttgccctcctcattgccatgctcttcttcatctacgctgtcataggcatgcaggtgagtagcagttgctttccctcacaggaccctttcaagctggccccgggtctgtacgtaggccaagtaaagtagaaagactaggtcacgattttccagaacgtgccccagataggagatgccccagtcgtcagtgtggagatcacgtgctctatgctgaggatactcagaaggtctacaagcctgtagatctcgtatcacatcgggattccctggtgtttccagatgtctcgggtagtactgcgtctggggcagcatacttttccagagaagcgtggactcgggctcttaggctgagggactacagcaagcgtttctgggttggaaacggtctggggccccattgacagctgggtcctaacgccatagggcagctgggtggcattgaaagctctgggtccagggagtcagaggggaatgtcctacactggtagagtggcattctgactagagagaggtgcaagtgagagaggcggggtaattccagcccagacagattgatgattgattgattgattgattgtcctgaaggcttagaagtacttgtaggaattctcttgggaattataggacaagaggcataagtcctcatgaggtagcccagggtagcctggggcactgcaaaccgcactgcacacccagctccagatcctcctatcgtgatttgcgaagaccatctgaaatagcgatctgctcataatgccactgggaaatctttgctgggcgtgaagcccaggaggccccgccccttcccctttgtctccagctatggttcatctctctgcttaccacccctcccctcctcagccttctgtgctccttcaggtgatgcccctctgcctggagaactgtcgctctgactgactgctgcttctccctcaggtcagggtttaggtgtcgctccctctggagctgttcctgctgttgacctaacactggctgaatgcgcctgttccctgatcgcctcagtgctcgctgtatctggttaccattgcttgaacactccgtagtctcctcagggcagtgactccttcggggtgagactgtacctctgagacactacattcctaatgttcagcctggtgcctggcgcatgctgtgcccagcagatctctgcagagcacaggaggtgcccggtgtcctaagaaagccctagttgctaattaaacccaagtcagttctaagtttacaaaagtctttttatgtgactgtattagtcggcatttcatgagtacactgaaatactgcagacagaggtagtctaatccacaagcccatcgttttgccctatgtcaaggcagggcaccatcatagaaatgcatcatgagacagacctactcaggcaggttggcagctccccacgttcccctgtgaagacaaaaccccagcagcctcagggtctgccactagaccacaacgttctacctctcaagagttctgcccgcagagatcaagtctctaaccacatgaaccttggagaccattcgagatccaaactgtaacagtgacaaacgtttgattcccttcccccctaataacttcttctagatgtttgggaaagttgccatgagagataacaaccagatcaataggaacaacaacttccagacctttcctcaggcagtgctcctactcttcaggtgactgggtccttgggggtggggggtggggtaggagtggggtggggtacccctaaagttctgaacagatggggtcatgcttgctcttgatcccattatttcttgatagacttctgatttgttgttcttgtttgatatttcttactttggtttgaaacaggatctcattctgtagcccaggctagcctggaacttactctgaagtccaggctagcctcaaatcataacagtcttcctgcctcagcctctcaaaatgctgggattgtatgttctactactctcagctgttttataccttttaaaaaaacattttttcatatgtatgtatgaatgtgatatatgttcgaggtggacatgccactgtgcgcatgttgagatcagaagacaagtttatggagtcagtcttccttcatttttacataggttctagggattgaacccaggtcaccaggcttgcacagcaaacacctttcaccccctgacccgtctcactggccataattttgtactaaacagaactagcatttcagttagagaggaactgactgcattgttaaaactgctggggtcattcagattgtgactgacagaccaccaaaagcaaattgtaggatagatatgtatgtgtaagtatgcatgaaggatgcaccagatcacaaccagggaaacagaaacacagtggaaacctaggaatttgtaattcccaaaattaacctgtaagccccacatgcccaggaatcaggtgacttcctggaatgctgggaattgtagttcttgggaaataacaccgccacatgggaaagtactgtggcctataagtttgcccttataaccccctgcaacactggctctaggccattccagctgggacattctagccaatggccttgaccaaagtcaatctcttggtcagtatttatttttttccctgtaggtgtttttaaaagaattacttatttattttatttatatgaatatactatagctgtcttcagatacaccagaagaaggcatcagatcccattacagatggttgtgagccaccacgtggttgctgggaattgaactcaaaacctctggaagagcagtcagtgctcttaaccgctgagccatctctccagcccagaatttaatatttaaatgtaatatttaataaaggcttgctttaaaaattggtccaaaatggtacagttgttttttttctggtgaatcacaggattaacatattggaccattactgcctcacattttttaggattggttttaatcccagctaatttaactttgcaaagaatcttcctcacagtgagagaactttctagaaacaaggaagcaatgtctaatgaccccagtaactgtaacaactcatttatttataacttaggtggttttcaactctttcaacagaatcagtcaggacttattaaataactaatagcaatgtttgatgaagagacaagaaaaaaaatgaacatccattaatataaagaattgaatcagacatcgttattataaatcgtatcataccagggcctctaagtaactaaattgtatctaaaagtcaggcttccaggctgtcactaatccaaacggcattgctacagttacatacattttgcacaagctaagaattttcttcccaaatgtctaatccatcagttccttgccctttccctcaataaaagccctgtctcttaacttaaacaggtgtgcaacaggggaagcctggcaggagatcatgcttgcctgcctcccaggaaagctgtgcgacccagactccgattacaacccaggagaggagtacacttgtgggagcaactttgccattgtctacttcatcagcttttacatgctctgtgcattcctggtaagcagtcttggtaaagccccttctccacttacaggactgcggtagcatttgaggttcagaccagtaatgctgccctgtcgtagtgctttgaggcagttggcatactctgggcccttctaggcaggtgtcttgcttagtctggcatgtgttgctgccttatgggatgggatgggttggccgctcactggtgggctggggtcatttccagccaaccttgttactgaaggctgctgtttcctttcaaagatatcaaagccactgtacgtggctttaagggcctccaaagtgtgagctgtctcttgtcacaattaaattataagattacagtgtgcttcagggtgcgagctaatgcaccctcccgccccctcatgagtctgtgccaagccatctggtcagagtcctgccctttccttgactactttctggcgagagaatattatggcctgcctctgcaacctggatatgtgggttccaatattccatgccctgcagttaggaggcagataacagtgcaagggacccacccaccaccctcctgattcactcttccagatcatcaacctctttgtggctgtcatcatggacaattttgactatctgactcgggactggtctattctggggcctcaccacttggacgaattcaaaagaatatggtcagaatatgaccctgaagcaaagtaggttgacgaacacccctctggctttcaggggtcctttgggaatggctgtggtgatctctgcaggggtcggggtggtaaactgagctcatttggggacctcaggctgtactttgcttccaggggaaggataaaacaccttgatgtggtcactctgctccggcggatccagcctcccctggggtttggaaaattatgcccacaccgagtagcatgtaaggtgagtgttctgccatccaagtctgacaatctattcgctgctttgttcagtacacacataacactaatctacattcgccaggcctttcttaaggtgttagacatgtggagataatgtctctgccttgacagcaccctcaaatttgcaatacttagaattctgtcagggataataatgggatgaagggaatcctacaaactgtcaccgcgtcagatgtcagaggcgatgatgtttaggccaggctcaggtgactatgaatgtcaaacagcatgtgtcaggtctttgggttgatccctagcgccactaaacccacatgaaaaacagaggagacgtaggagtcagtcagaggcaggcaggcaggtgggcttctcagacaggagaacagagtccagatagaagccagaagaggaagagcctcagactagccaacagcaaggcattgggtaatcatctgactggaacacaagaccaagtggcagaggcctctgtccccaagctgaacctgaatattctgttccacaacatattctgtggaggacgatgagattccaggtcaccaactcagagttggtggtgttgacatgaagcggactggaggaaggaactacatgggactgccaggatgagggccgcggggatggggagagaggagtgggtagcatggagatgagctgaggcagtacaaggggcacagtgctgccaggtgaggagatgggggtgagaaaaggactaatttagcccttggctcgatggtggtagacctagggccttagcttggtggtggtagaccttgggccctagcttggcagtggaaggtattgggtcctagcttcccagttatagacagggtgacagattgcatgtggcctctttgctgtagaattctgtagttcctttccctggggcatgaagctgaggtgtctctgggatgagcttaggtctcctaccctgtttctctcatccccacactggtcacgtggagccttagttcacactggtccttctcccatagagccacagggaccttctcacattattgtagcgacaggaatgcaagttttgtctgttgaacttctccttgaagaaatccattcccagcacagaatggaatgaattaatgcacagaacccagctgaccgcagtcatatttgtctggactccaggaccctttacctaaaggatttaagtgggacacaaagtcagccattttgctgacttaggtatttgtcaggaagagtgaatgaatgcccatcatcctggctgcactggctgtggagacaggaaaggttgatagtggcatttggaacttaggtaggttgcctagacaactgaatcctcgtccctcggcagcggcagcgtagaaaaaacatccaacctttcttttggaatgaactttttagccaatattaactttggattttattttgttttattttttgagactggctgacctggaagtcgctatatagcctccccaagctaacctccactcaagagatcagcctgtctctgcctcccaggtgctaggattaaaggagtgtgccaccatgcccagctagaatttgtttttaattaccattgttaaatgaacttcccatgtgtttatgatctacttcagtcctcacaaggcctattagcctgccttgctgactggaacccaaagaaggtgtctcttaccccaagttcttctgcaactctccttgatgctggtgttagaggtacttggagaggggtgagacgtgggaagtattgatctattctgaaagtccaagccttcagagaagccatggagacctccccaagatagcacatgatgatctgtctctggaaactttctgaaagaacagtagtgagttctactgggtgacaggctcaggccctgtgcctggcctatgtatctgctgtatcatttaattatcataaaatccttaaggatgtacctagagggtaggcctgtccccaggacacagagaactaactactgaaacatgaagaacacatgggcaataaaatttaattatttaacattaactagcatctgattgtcaacatttatatgtcacaactgaactttaaactttgttatctcaggttcctcacagatgttaggttgtatctgtcagtattttccagagaaataggactgatggggtggctgtgggcttatgtgggttatgtgtgaccaatgtctagctggccatgtatagatgtacatacatacatacatacacacacacaggcacatacaagggccggtttattatgtggtatgggcacatgtgatttttcaagttccacgatctgtcatctcctagtgggagactcgggatatctgtggtaccgttcagtctgaggcctgaggcctgaggcctgagaaccggggggactgacgagatacatttcagacagcagtagactgatggtctatcttaaactgataggcagaaaggaaaggcaatgttttcccacttctttttgtgctggagttaaatgaagactgccaacttttacaggcatttgtgtgacttagcccaccaattcaaatgctagtctctcccagaacaccttcacagatggacctagacatgatgtttaagccagtatctgagcagcccatagacaagtcatgttgatccctataattcgccgtcttagagaggctcccagatggtttttgagttgaagtgaggaacatgaatggggataaacaaagaatggacatcaaaaggggacatggctatctgtattctcacgaggaactcttttttatctacagagattggttgccatgaacatgcctctcaacagtgatgggacagtcatgttcaatgcaaccctgtttgctttggtccggacagctctcaagatcaagactgaaggtacgcactccctggaagcaggaagcgaggcaggcagcaggagagggagatgttacatgcgcacgcgcacacacacacaccccacccccaccccccacaccccacacacacagagggttcattgtaggaggcaggggacgcagattctgcaaaggctggagagtgagcctgaggtgaggaagcagaggccttgcagagaggcaagaagggaggagagagatgaggagacattgccagtggggagacaggtgttcttcacaacgctgaagctctacccagcagagctagccccttcccacctagcgcatgcttcttatgctgcaaacaagcatcattaagtgttccagaaggtaggagggcctactaggtgatgtgtccctagaaaagaacctgtcaaatagagagaagtcaagattatgagggcagagtaagtacctacatagggcccgagatgtgtcttatggtgaagttttcttgtgcaggaacaaaggcaggaggagatggagggagagaaaggagaggagaaaaaagaggagagtgaatggaggaagaagaggtagaggcagaggaggaggaagaaagggagaggaggaagtagggaagaagggaaggaggaggaggagggggaggagggagaggaagcagcagaggcgggcagttgccttctggtgctgggagccaagggaggagtgtaggtcgtagctggggtaggttgctatggcagcagaaggtagttgatgaattctcaggtggaaatgatcacccccccagaggtggcttggtaaatgcttctgaatataggaaatgtatttagcgatcactctggatcacttctatcagaaggcaatacaaggacccggcaacataacgagggcaggagagcactcggccacaaacacaaagcctggtctatgcagtggccacacacccctctttttaccttttggatttagggaacctggagcaagctaatgaagaactccgagctgtgatcaagaaaatctggaagaagacaagcatgaagctgcttgaccaagttgtccctccagctggtggtcagtggaacctatttcccaagtagttcttgatcaagaaattagtttcagtggcaagacctccagacagcccagagagggagtgcagggtgctatcccagaccattagagtgtgaggcccacagctaaaggagccctttggcttcacccgaaaatatctggggtgatacgaagacagtcaaaccaaagaggggcttcagtgggggagaagtccagagcccgtgaggctagagcagggtttttgctgtcatagaaaatcagtggtaaaggacatgacagcactcacagagtgaaaagcttgaactctcgccctaaaggaaatacttaaaactagtctccggtcttaatcatctcaagaaacgtggggagttttcagaaaagaatacttctaagggaattttaagaagacggcatttcccactgtagttaccaagggtgtcctttaatgagatttagagatagaactaacaagcatgcttcttttgttatttatcacaaattaactgactaaacatttagaacttgcatatatataatatctctctatattatatatatatatatatactgtttctctatttttgtttaaatacttgtggacattgaagtgagatggttattttccaactgttttgtttcaagttttaaaagtgcagaatctccttacccagcgtcccgtctccctgcagtctagctaaccctagcctggaaacacgataaacatctggcatgttttataaccaggcatggatcagaaccagaagctgaacccagcacccagactgtgcgagcctgtggctcctgagggacagagagagccatgcgttagccactcttgcttcttaggaggcttggccttcatcatgattcaggccacccatagctggcctagccactagctcaactctgagaaagtggctcagaaggaaatgaccaacatggtgggaattcccacctccagacccctagccccaagcccagattctgcacttttaaaactcctctcggtttccgctcttttcctttcagctgcacatccaagtggtcgcatggcttagatgaaccgcttgttaaaatgttgtaaccctgtgcctgagcttcctctgcagcttccactcctctcaactctcagaatattctgaagcaattctgttttagggtggtggcatggaatcagagttatctcttgccaactggattcccctacattgtttgttgaactctggatgcatgcgtcaggatagcaggctgtgcctgtctgtgtaaaccctccactcacgagcctgcaacactcccctctctcttgttccaactcgctctctttggaaacaccaccttcatagtggtccatctgatgcccacaggaatagctctcctcacacgaggaggtatgcttgaagtgtcacctgagtcacggggacggtgctccatttcttttcatcttactaaggaaaagaaaagttcagactttggcttataatctagctaaactcttcttttgaaaaactgaccaacatttatctccattggacttttcatggaggatgaacacacacacacacacacacacaccacaccacacacccacacatatacacatacacacacacgcgttctggggcttggtggttctctctgtctctttacatggtttggggtttgggatgataggagttaatctggtcccccatgtgatattagagaagaaagaactagagtcttataaagacatagaatgctccataaatttctatagtgcccactgtagtgcctgcttatttactttacatatcacataagcacattgccaccaaaggggaccacacagcacctttaggccttggtggatagctctggttttagtttctatattcgtcatttgtctctttctctttctctctctctctctctctctctctctctctctctctctctctctctctctctctcctttcccctcccctcctcctttccctcccctttctctctctttctcatctcccattggaccagtgattcccagtctttctctcatagtggcacacttaagaaatgacaccatgacatataccttgggacagatgggtggttcgaagtgttagtgtctcccatagtataatgtggttagagaccagcatgatgcgctgcctatgtccctgaggagctcaggagaccacataactgaaggagggaacagagccagatgcttgtctgggcagatttgccactgggatgtgatctgagctgctcatcgtgagcttggtggaaacaatgccaagaaccagccaatgaggacatgctgggattttctttttctctcctgtctgcctgcagtctgacccctgctttttatggggctgagatgtctcagcctggaatcttgcctgggttctcagtgctcccttgtcatatcttccaggtcatggactccccctttctctttagaagctcctttccctcggagaacctctttcttttggaaattccttcttgagtcataactctggttccttggtcccctgggtgtcctcctgtccaagatggcctcaccacatccattgcttctctctgtccctttcctgtcaatgatcaagctttagcttttcttgttcttaggagctcttgttcaggccaggtctcttggtcctcctgctttatctcagtggagataaccatgtctccttctagtcctgccctatggatctaaagtagaagagaaaggacagcaagtgcatcttttactagaaacatcttggtttaaagcaatatgagcctctatgttgaatcaggagtttcccagggctcaggggaccctggagtacaaaaggtatcagtatcgttgaagtggtatagattctagactcttagatacattggcccagcagccactggcctacttggaaggagctagaaagggcagggctacgtttataccaccagaatggcagctcagaggaaagcagggggttgggtgtggccaaagccactctctgaagagagaggtaaagttgggggagagaagggccctgggctcaggccttggccagttgacctgggccagtcatgtaacttctccctctctcagaagagtgagcagagttgttatgtagaagttatgagacccacgaggagttatccagccatggtgcctagccatggctgatggacagagtggtcagaagctggagagagggcaagcatgggctttgcagagcaaatatcttggcttgtttccctatggatggtgccatactggatggtggagaagaaccagtagccagtcagggagatatgagttcagatcaacacagagccccgggtttcttcacttgctcctccatcacaccagggcttccttggctcaggctcaggaggaatataacatttctcaaggccagttcaccccaaaacagactgcacaagaattctcagcagcttctggcaggaatggctggagaatcttcttccccaagtgacccagaagccgctgggtgggaaccataaatcagccatacctcccaagtgagcactaagtaaaacccaccaacattgtattcatggatacagtgggtcccagtgatcccaggcctcctatgctccagcatccattcagtgagtgatagtcttgtcttggtctgaagtcatgactcttgtcatcagagggcacgtgacacaaggacagcccacgcctgggttggagtgctttattccccttctcttaaacatccttagttcttctgacatgggacaccattttataagggagaatacaagctcacctaagatcctcttgtccccagtccacgggactcttgcaaggatagcttgaccagaagcctgaggacctacaactgatcctcagcctctgcagnnnnnnnnnnnnnnnnnnnntccctgatctgtgtctctcaccagtggggtagctgcgcagctttaggtaaattcacataagagagggctttcactagccaaggtcagagttcctgaacctactcagggtggtttcaagtttatctcctccccttaggactctaatgagctatcagtgtgcctctagtaaggaacgggaaaccccatagtaagaagaaaggaatgaagaagtccctgaagacacgagcaatattatagaggcttctttgtaatcgagcatctccactcacttcgtccagagaaagcaacccctggcaccacacacagcgagcacaggaagctctagtccaagcctcccacacttgggcctgctgtctggatggtgcctgacacaggcaggctggggctgacccggggcggggcggggcaggggggacacagttcacactgacatgctcagagtggtttaccatgagacagtcagagcttctattctgcctcatgcatcaccttcaaagttgtcagcagagtcctgattccccggtgatacgtgttggaggttgtttctgaacagagcagaaagaaagcctgctcagtgctgaagttagttggagctgtcactgcaatgcagaaatccagccgttctgaattccaaaccacaaaatggtctcagagcttattggtggaagaacggggggagcgtgtgagagctggatctgcagtctctgttcctctccttctaagctcatcagtcacctttctaggtcgccatcttgtgacatagggatttggatgcataattgcacttgatgcttacagtaattacacatgcaaatttctatgcacggggtggaaaaacatgtggcctgcaaggcctttctgttttgtaatgtttattttaagtaaataaccaaggtggcgcttcctatcgttactaatatgctactctatttaactcgtgataaatatacattactttctgcaactctgaggatcagtttacttaactgactctagcttcgagccttaactgctttgcaaagctttgcttcttgctagactgagcaacccgtgttataggctgacagcccagtgccctttgtgcaccgtcccaccccacccctgcccccagccagaagtgagggtttaggctcttggtccaaatgtgctgattcgggagagctgtgtctggtctctccgtttagatgatgaggtaaccgtggggaagttctatgccactttcctgatacaggactactttaggaaattcaagaaacggaaagagcaaggactggtggggaagtaccctgcgaagaacaccacgattgccctacaggtgaattgccctcttgctctgttctcttctcactaacaatgttgccagctttgatttgaaacactagagagctgactattcatggttgagcagtgccacaaggattttgtttaaactgagatactgcccactgcccctcccactgtggactagccatttccgggtcgcaaggtaagtacttcctcctcttcgtgtcttctccgttgagcctcgcacctgccatcatctggtacgcgtgcaaaaccctcaggacagcctgcaatgggaaaggagtgaatgtcaccccacaccctagccacctgagccttctccaaaggcagcgtcctcgaggcaggccccctcccgtagccctgggctcagggtccagctgcccagggttaagctttccatcagaacgcaagtgctttgttttgtttctgtttgtttcttaccccacggcttgttggtttttggtccatttcaataacattcatcactccctagtatgtactgtgtgcacatgtgtgtggtgtgtctgtctctgtgtgctatctcctgatggcggtaaggcttgctgtgcaagtgctacacacataggccagcctttggcccatctccctgtctccaactcaggacccatatacatgctcagacaagaatgcatgtacaagagtgcctgtacacgtgcggacgcgcaaacacacacacacacacacacacacacacacacacacacacacacacacacacattcaactacccctgccaggccctgaaagtgtgagtgtggcatttagaaatatctggtctagtcaggggctaggcatccaaaggccatagaatcctagagatgcctagagctctgggtggaagcaggcatggagaggcaaggagacatgctagaacttgcaggcaggggagctggggaaggtggtttagggggtgatggtgtttaaagaggactggggacagatgtcaggagaagagaaaggggaagtacagaggttggcaagctgtcaccaagtcctacaaccatgctatctggagtgccttcagtctgccataaagacactttccttgtggtttaaaaagtttacctgaaaatgacttttatgtccctgtcctcatggttcttgaatgtggcctcgtaggtgtcaatgggggaccacgtggaatagtcctgtacttagttccaagagcaaatcaccagcattgttgtgtgtgcaaagggggccataactgtggacactaaggcctgactgtgatcttgctgtgagaaagactatgaataaggaggatggtgaatggggaatgctgggtgtgtctgcacatctcaggttagtagatggccttgtagacagtgaccagctgactcagagtgagatcccaggggctggaagcggggatattgtgctggtgggacaggtggacacctatgcctattcaagccagcctgtgttctttcattccctgatcacatgaccttttggtaatggcccagccatttggctcactgtgtcttttgcctcctgctgccctggtttgcaagaaataactctaactctaagattactccagttcacaagtagcctcggatgacaaaaactgaaaagtccagtttgcaaatttgaataggtccctggtttgtacattgcttggtagcagcacggctaggctggccactagcagagaattggtgtgcactgaaagttgtccccctcacatgaccttctgccccaaggagaggctggctggatctctgacttctctgggtaccctctacctacctgaaatggcttgctgctttagaagtccagttgacggaatcaaaacttggcttcctagaggggacttaatctcttttgctcctaaggtcacaatttgcagcagtcagtttgtctctgagctcagagacaatccaggtttcagtagagatgtgacatgtaaacacttggagctctgtgtgcatgggggagggctgtaccttttttgaagccccaaggctcactctggtggcagagctcagtgttttggtattctgaaatagcataaatgacacatggcttaagtagtcactgcattttgcagatgcagtttactgagccttgagctggtgctgacagaatgctataaaggttctgggtaagagacaaccacattatgctaaaataatgttgaggggtttctcctgtttaagtcttttcatcttgctatttaaagaaagagtcttacttcattggtagaagtcaaatatttctagttagacggtataaatacgttctcccagggttctattgagaattgaggccaggcctgtaatttatattaagtacacagcatagaaaattaagttgtgttcataatcttgacagttcagttctgaaaaggcatttgattctgaaacaaacattgaaaatagaaagtgtttgtctccttgatggataattctaattacatttttggcttcctctgatgcagaaatggctttaaatgtgatttgttactctccatttaattagtgcgtaaggaaacctccttttctgcattatgaaatatcatgggtggtgtagcagttaaggagctaggatcagtcgtgggaggaaggcactgacttgaggcagctagaaagaagacacatccttgagacagctgctgagggtggacttgtctggttgagaaggaagcaatgggcttctgatagcagggcccagtggggtggggcagggcggggtggggcggggctcccagcctggttgtagtgggacatggagtgtggcattattgtgtgagcaaaagtgaacagccaagcttgtgcgtgctggcctgcagagtgaggtctgtctgaagagctctcagaactggcaaccaagctgtgcacccccatttcatgccatggctcagcccgatctccccatgttcagaccaactgcagtgtgaaccttccctgtggtggatgatgactgaaggttctcctgcctctgcatggggaggagctgggcgcctgtgtcctggcctctctggtctgaatgagtgtgcactctccatccatccacccaccccatccatcccttcatccccatcattaaaactaaacttctctccagcccttctatggtgggagccagagagaagctgcatccggccttttggttatctctcagtcatccgacatacacannnnnnnnnnnnnnnnnnnnnnnnnnnnnnnnnnnnnnnnnnnnnnnnnnnnnnnnnnnnnnnnnnnnnnnnnnnnnnnnnnnnnnnnnnnnnnnnnnnnnnnnnnnnnnnnnnnnnnnnnnnnnnnnnnnnnnnnnnnnnnnnnnnnnnnnnnnnnnnnnnnnnnnnnnnnnnnnnnnnnnntcacaaccatctgtaatgagatctgactccctcttctggagtgtctgaagacagctacagtgtacttacatataatcaataaataaatctttaaaaaaaaaaaaaaaagaaccccatcctttgtgatctacaggatgtgatgagtaggttcaatggctttaatgcctgtgccttggccacaggtggggatggttgagagatgctggttacaagtagccattagcttgagtcttctgtttcttactgtggtcttctcagtacccaaagacagggaagcaggctcccagagatctgacccatggctagtcctgttaagtgtgtcaccatgtcaccttaatctggaaggcaatgggatttctcatttttagaagtaatggtccacccaaagccatagcactgctcttaaaatttatatatatgtacacacacacacacacacatacatacacacatacatacacacacatacacatacacacacacatacacacacacatacacacacacatacacatacacacacatacacacacacatacacacacacatacatacacacatacatacacacacacacatacacacacatacacacacatacacacacacatacacacacatacacacacacacacatacacacacatacatacacacatacacacacacacatatacacacacacacacacacacacacacacacaggttttcctttttactgtgagaggagaacagatgttaacagatgacatttcactggctgattcgtttgtttcagatgcttgaacggatgctttagagttctctgcctgagctaccgcaccaagctggttagtccgaaggcgcttgtggctaaggccttgaaagggcaaactcccactcgggcttatttctgctgacgcagcagcatttcaggagaaatgcaggcaccacagccctggggagaccccttccgagcaaggcactcctccggaaggaaggcagaagccgggctgtggctcatctgtggagccatggctgcctgtggcggacactgctcatggcggctccttttcatgaaagggaacctacgaattatggttttcccttccaagccagagactcagtgaaagggggtggggggtgggggagagagagagagagagagagagagagagagagagagagcacgtgagcgcgcaaaggggcagatgccccatgagaaatgaaatgaacacaacttgctgacaatggccagtaaaaaataataaataaataaataaataaaatgttttatatatatacatatatatgtgtatgtatatatatagatagatatacatgattaagcagacctgcgtaaggcaggcaactgactccgccccaaagtcctgcatccctagtttgcccgaactcccaaagactggcaggctggttggaactgagcagacagagttccttttctgtgacagcgcgtcacggcctcctgaccacccgccctgcttgctgcagtgacccagtccagaatgcactaataagtggaaggccaggaaactcagacacccattgaaactaacacacacacctgcatgccaaaaccaaccaggcaacagctcaggttccatcttaccgtgtcttcgggaaatgccaccacacccaaacctcatctaacattgttcgtctttagctcgcactcagagccagtctgggacgcctctttggaagcagtatggtctagtttcaaggacactgggagtcagggaacctgggttctagtcccagctccagcattcacttgctgcgtgaccttgggcaagacacttaacctctctgtgcctcagtttccccaactgtaaaatgggggtaataatgtcgacctacctcacagggctgttgtgaggatagctaagtgattgtagagctccttgaacgtatatttgcttattattaagactacaacaataataatatcatatgcctgtttactaccagaacttcaagaaattcttggtttggtttgatctcttttctgttctgtactgtagttatccattgagagttctctctatttttaagaccctaggcgatgcataaggatgcaaacaggtaacctgtcaggtcgcattttcaagtagcaacaatagtagatttttgaccaaaatgttggttgatgagggatttgctatcaaattctaaactccttcccagaggggggtcaagtctgtacctctgatattagtctgagatgcccaaaatagccaagaaaggagagccagtgttcaaagatcaatggttatggggggggggggactctaaaaaaagaagagaaggaaaaggaaaaggagaggaagaagaagggcttccaattcattgatctccttttgttggcttggagatcgtagcagggtgtgtatgcatgtgcatgactgtgtgagcgtgtgtgagtgtgtgtgtgtgtgtgcttgagtgtgcgtgtgtgcgtgtgtgtgtgtgttacattagtggatggaatgagttggtagggtagagaatgaggtgaggtgagttgaaagacaaggaagagagagccaggactctgtgtggtcctactctggcagaaagaagtgttcctccaagcatctctggggtgcagctaccctgaaggccaggctgaggtggtggggcaccccccccacccccagtgggcaggatgctcctttagacctctcccagggaagcctagaagggctttcttagtgacaccttgtagctatgacatttgccccgaccacagggcttccctgcctcgtggcttcactttcctacacaatggtggacctcctgggctcgctatggaaacaaacccagctttggctcatgcacaggtgacagtgagataaggagctcatatgggttttattcattctcacggcttgaagcccccatggttgatggtgtgggaatgggtgggaaccaagccttacatcatcctgggtggcctgtccccttggaagagagcaaagcccacccatgtctgatcttaatgctgtacccatagctgttgcctctagcatccaaatctctcagccagaagcctgcccttccgccccatttctccatgttttagcaatcactgggctaactcttatcccggcaggcctctgagattacctcagagatgatgggcagtacctgggtaagccactgtatcagaatcgacagagaactgatacatcaccctgagagggcgaatggttagccttacagacatggatttaaataaataaataaataaataaataaataaataaataaataaataaaaggactgtctcttagccaagaagcttccctgcccccaccttccctaccccggccttgatatcacttctgtttctagacctcgtgtagttctaatgggtagggctgtacaggcctttctccatgtatcacctaaacctatagacgttggaaaatgttaacttgcttacaagcctgatttaagggatccctacaatcccttgggcctggctgtgttgcagccaaggctactttagggaagacagccaagcatcagagaggacttcccccagctttcacacaccgggggaaatttcctcagagctctggcagaagaacaagcctgtggcagagaggaagatggaagaaactagttgggtttcacgtttaaaatcttcaacgatgggtacagcaaacccggtacccagcatctgaatctgcggtgctaaacttttagctcctgggtcaaatgtgacagagaccagcatccatctgtcacagggaagccacagtagggtgggaagtagattcttatcagaatcgaaggtcatggtatgacccaattcagaattagtccacgggatgaccggaccggctttctgaagaagggaggttggtctgtactgagaggagtcatttttatgtcccaaagtccttaatgaaaaagttagcgcaagtaatgtcatagccgcagactcttatggtcgcatgttctttactaatattcacccagtgtccctcaattgcctatcatagcacggctccattatctataggaaagggcttggtaagtaaagcttagggttcccaggtgagtggatacctgggtgaccttactctccttggttaggtcttaggcctgagaaagttgactctgggacagtaaggagaccattcatgatgcagtgttgaggtcaagaagccatgctagagcatgcccaccatactggaacttgagaggaagaggcaaaggctagctcagagaagccacatggtggacagaggtggagacatgtaggagggtcagaagagctgagcattaacaggagaccacagctgtgctgctgggtaggggacagattggttggcagttctcaaacatttcaatcctagggactttcctagtcttaaagtttatcaagagcccttatatatcaatatttactgtcttataactcaaagctgattaattttataaacacaagaatatgtaagcacaaagaggccagggggtggtgacaaccctgtcattcggccttggaaaccttgctgcacacttagagagtgagaatatacaaggccaaggacatccactcttacacgacccccagggacccctgaaggagtcccaggatgccttgaggtccatgaaccacatcttgaaacatcactctggggagatgacccaaagttcccccttaaaggcagaagatgttggagcctcatagtttccatctgtgcccaggaggctcccatgtagctggagcactccttggtgggctgcttctgctcctcctcagcctgtgcagcccacacaccttcctaattgaggccaagggtcaggtggtgtggacttcactgcctgtggtgacctggaagagcaatggttagagtcagtgagtgttagaaatgtgtttgaatctctaccacctctgcatagcacaggtgagaatcagggtgtgtgtgtaacgattaggaaccattcatcacgcctatgtttgggggtgatgtaatggtgagagtgagggtgtgtgcggtgctgccggagcattcgtcaagtccacgcagtggaggtgatataattgcttgcctacgttagaaggataaccttgaatgaatgtgtgcttgagacttggttaccaccctctccctgcagattgggaaaaacaaggcttctagctgaggttttaactagttctggaatataatgtaacctattacatatcgtcttggctcatccctcctcagtatgtaggctcaaaatgacaggaatatgattctgccaaaggagcctaaaattttggagtctgaattttatataatgctgtctgcatttttaggaactgttcaaaaacgtctctgattctgatgttaaaccaggaatcagagtggaataagatggaagggttggtagtgtggcccagtggtccgtgcttagcatgcctgaggccctggtttagtccccaccaaaataatgtggaactgcaagtggcctctctgttctttgcagtcataggttgcttagatagcgctattaaataacccctttagctttcagaatgtggtggcacatatgatttgtacagcccagcgctggccctcagtaactcatggtctgatgactcgtcaaggagaggagggctcgctgtacatgagtaatggagtgtcatagccatgattctaaccctttatatctaacacgagaactgttcacaatggataacaaaggccacaccatgacatttctcctggaggaaggcagtggtagaataaggggtgtgcccatgtgcagaggaggcgggggacggcacatagacaagcctgttcattctttcaggatttaatctcccatcttctaacagctagtctaaaactgttctttgtaattgagtgtgggccaagtcctgcccctcccccctaaaattaaccagaacttgtcaatagtgaggtgactgcatagagccagctttggttaaatgaggcgtgtctgggttgaggagcaggctgtgccacggtaacgttctttggcaggagtctgaagccctggcacccactccgtgaagatggagggtctctcccagggccgcctggagacttgcctctctgtcctccactgctacagcgtaggtctggggtgggtctctgggtgtttgtgtatgcatgctgtggagtgagagttggcagatggctggcctgacacagggagctagtctggggaagcaggcagcaaatgcttttcaaatgcatccagacagacagcaccccaccctgagggtgagccaggaagggaaatgggcatttctgctccacagcagagcgtcactttatgctgttgcttcagagatgttgagagagaatatatttttggtgacttaatcattaagtagagtaaatatctataaaattccaattaaatggtgtctaaaacttaaaggagcagtctacaggcaaaatgccaacatttctttttttaaacaaatatttatgataacagctagcattttaaagtcaaccagaaactaggcttaatcctgtttaatattttgtaagattggacatcttaaaacaagtcaataatgtttatattttatagcaattctgtgtttattcaaaactataactctactgtgatgttaatggaatgactttatatggctatgtgtggattaagtgctaatgaccacatttcaaattaaaacaatatttttgctgatagagatagatatataaaatatgaaagactagaaaattttactgactgtaatgttttcttcaagaaaaatactttttttttttagtgttgtaagtaatttctctgagggtttaagatagttgtctgtattctggaacactggattctgtgcctctgggggtttggaacagcctaagctaccttttagcttgatatgtgtgctagaataattttcattctcgtgttttgtgatatgtaataaattcagggtgctgtgcttatgctccatttcaattctagctgggaacctgtgtgtcggtcccctgcccccaggtcccacgcaagagagcgagtcagccccactcttaccaggtgcgctttgcgaactaggatcatgagttcaaaaccctctgctttcacatctgggaagagtgttgccttctctcctcctgtctctttaataaatatgttgtcattatctgtttggggaagtggtaccccaagccacctgtcaaccctctccatgatttatgttgcaaacgaaccttctgtcctgtctgtttactccccattcctgtcaacgaaatcctaatctcgtgtaactctgaaggtgtgctggagacagtttctgttttcattatgcaactgttacatgtgtatttcagtgaaatgtcaactcatcaacgaaggatgatgttaaaaattatccaaataaatagttttctatttcttttaatgatacctagtccagtcagttaaatgagagcaagactgttatttaaactggcaaatgttcctggccctatgtcttgagaatccatctgcgttgatgtgcacagtgtacctgggagtgtcaaagagaatgaatataacccatgtttattttatggaaacagaagcaggggtttcaagcattgtgtcttatccgaatctcaaatacgtaatagacctctctcgaaaagtcagacaagggactctcaccactcttcttgtgtcttgagaattgcactctagagactgaatgagtgggtatgtatggccgtactccacatgcccgcagctgaactgagtaagaccttctaccaacacacccctggagctgccttcatggtatttctgaggaatagaggtgggcctgttgcagacctagaaaatgtgctggacataagaatctgagagagagagagagagagagagagagagagagagagagagagagagagagagagagagagagagagaacaaacttccaaaaacacgagtgtatttgtggttagaagggcagcaggaagtagctttttttggcacgccatgaactgtttgggaccctgggatatgctgggatatgcctctttcccttcctgtacattgatatgtatgctagaagactgtctttaccaccttctgtggttacataataagtgtggggtaccatgcttaagcttcatgccatttttagttgggaatgtgtgtttgtcccctctcccaggaactaaggttcctttgcctaacattcctaggtaagacccataaagcttcgattccctagcttgacctttgtccctacaattcatgaaacagaaggacctgctggtgtccaatcacagaagggttcggaacaaaccagcctttttgcagaaccacctaatgaaccagatgttcttgcggatgcagctgttgttataaagggccgcttgagaagtctctggacaaccttacattttgaattaacctttgtcaccaccgatgtttgcagatgaccagctttgagtattttgacaccaggggttctagctcggcttagccccactctgctcacctcctctctccttccctcccctcttcccttgctccctccctttcccttttccaagcatctgtcccaccacagtgtctcaggtgtgagcactgctctttatctcagtccttctcaaagctactcaacttctgtgtggcgctgagaagaaaggccaggaaagtgctctctgcccagggacccagccctccacgactgtcttctgtaaacggccctgaggttggagcacaagctgcttgtccaggcagtgtctttggctccctgctagcttgtaggggttactatttgctgcctgcataccggaggtagaacctaagaccccagagcgactgtggagaaggatgaaacccctgttagtctgaagtcagcatcttgaccttcttcaaattaatgctgaaaactcaattttctcagagcttgtgactccctttaccctgtttacaggccgttcacatggtttccccgacagaggtgtggatgatgcagactttcccaggcccatcatgactgaccccttgggctaaggaaggccagcagagagggtctatggggaagtccagagagctgtcacccgtgggtcttgtactgcctgtagatggtagcaagacctcatcagtctgtgtggtttcagaatcccgccccctctgctagcaggtcctcagtgtgtatgggatatataggccaaggacccccccccccccaagggctggagtggctccactgcacagcagcctcagcctgtgtgactgttgatctgtttccttgtgacctgagtgtgctggtgactgcaatgtatgatgtcacccacctgttccatgctttccagtgagtcagcggccccaatggctgctcgtttctctgctcctaagccagctcatcctccatgcagccaggcagttctcgtcccctcgttctttttaggaacaactagctgatattccttgccctgtttgggactcaggatatgcttctctgcaagcagccttcctgaagagctagtcaggggcatacactgttagctgtgaccattcctagtgctgatagccaggtcatatgctgttgagtggggcatttctaggggaagttacttgatcacaagccttaatgggcccaacgtagctccactgggacctactgacaccccatccctaacggcctaggtcacagttacagttagtcagtacttccttggattggcctttggagaaagcttcccctcctactgctccatcaggctggaccaggcctcctcgatatctaacctgttctgccattttcattgacctaggcgggattaaggaccctgcatgacattgggccagaaatccgacgggctatatcctgtgacttgcaagatgacgagccagaagactccaaaccagaagaagaagatgtattcaaagtaattattccacgcctagcgcctcactggccacatggagatagtggggcgggtggggctttggttagggtggttctgatccgcagaggagtgtggacaatacaaaccaggggcaggggctagagaggcttgcacatcctgccccactccaccctgggacctctctgttcaccagtacctcttgtgggccagaccagcctctttcctgagctttccccggtccccagctgtcagcttctcagctcagccacagcccactgaccacagagtccaggaacattctgggtctttctagcagctgtccacgctgccttccttctgctccagcagttctttgatctgccagccagccctcagcctcccagctcagagaaaatgtcaagtaccctaccttggggctacccaccaagccagctgggcttaagtcacctcatcttggagcgcctggaagaacatacccaaggggcagcagagagcttgcgccccagctcaggacttggtaaccttcctcatttcaggtgggcccactgccacacgagtctgtccacctgaccactgaaagagaggctcaggttgtctctcagggatcctctggagcgtgccctagagtttgtgtttcatgtagagaaaaaaaaaaatgacctaacgtagctaagcctgcatcaaatagttgttaaattacctggtgttgtctcccattattttgcagagaaatggtgccctgcttggaaaccatgtcaatcatgttaatagtgataggagagattcccttcagcagaccaataccacccaccgtcccctgcatgtccaaaggccttcaatgccacctgcaagtgatactgagaaaccgctgtttcctccagcaggaaattcggggtgtcataaccatcataaccataattccatagggaagcaagctcccacctcaacaaatgccaatctcaataatgccaatatgtccaaagctgcccacggaaagccgcccagcattgggaaccttgagcatgtgtctgaaaatgggcattactcctgcaagcatgatcgagagcttcaaagaaggtccagtattaaaaggtaaccttggaaagggtgatgctgttgtctgcccttgtcacacccgctccgcagggccagtcttctgccctgtgctctggcccatggtaactccctggagacatttgtatttgaacttgagagccacttgcctcttggcctctctgtatgtagcccgtgtgagggacctaccacataaggggtcacccactacccaccttctgcatggggtgttctcttaaaacaacagcagccacaaaatccacctccctcagttatggtaacattctttgggacaggggttggtgaatgtcttctgtaaagggccagtattttagttttggggaccattcagtctctcttgcaaaactccccaggtttgccatggcagggtgaacatagccagggagcattctttttttaatttatttatttttattttttattaattaggtattttcttcatttacatttccaatgctaccccataagtcccccaagccccccccactgacctcccacccacccactcccactttttggccctggctttcccctgtactaaagcatataaagtttgcaagaccaatgggcctctcttttcactgatggccaactaggccatcttctgatacatatgcagctagagacacgagctccggggggtactggttagttcatattgttgttccacctatagggttggagacccctttagctccttgggtactttctctagctcctccactggggaccctgtgatccatccaatagctgctgactgtgagcctccacttatgtgtttgctaggggccagggtacattcttaagaaacgaagcagttgggttcccatagagctgtgcgtgtagcactggaatttggactttgtagggctagaaagggcaaaagggttcgctgctttttactttgttttctgccctttataaatggaaaatccctacctagatcgtgggccacacgaaaacagatagtagaccatagctggccagcaaactctggtttgcctgcccccgctccagaagacaggctggtatctgcgcgtctaatgcttttgggaatgtctaactcttcttctccctccttcccatggtatgccttccctggatagaacccgctattacgagacttacattaggtaggtgcttgccgcttctgtctttgtctggaaactgtgctgtcctgttacccactacatttgctcagtgccaagccatcaaagcatttgttctcgaaatgccagagctttgcattcatgaatgggcagttcccacttatttctcacaaaggaaaactggggcccaccagtctgtccactttccctgcccctgtatagctggggaggcctaagctgctttaggggtccagattctcacgtggacttaggagaagcacagcccagacatcctgaaaaccaggccccagatccctctggttaatgtgtgtgcgtgcgtgcgtgcgtgcgtgcgtgcgtgcgtgcgtgcgtgcgtgcgcgcgtgtgatgggataatctcatgtacatgtgttaactagacttccttatgggtggaatggtcactttcctgggggcaagaggaaagggcttcaggatcattgcttcaagtaagaccaggaggttcttggtctgaggagtgaacaaatgagttgctcttagtcgatgtcactgagccctctgggcctcctggggcttgaggccagaaggcagggcatttcatggaaatagtgttccgacatagggcagggaagcctgtggaaaaaatttccaggaacacctctctagtggcagaaaagccagaacttcttcagcagcctcgatttgatagggcaggactgagatctctgtcccaggttctgaagtcacattggctggagctggggtgggggagtggaagtgaaacagctgggaacctagggacttttcgtgggtcccctgacttcagagtggaggactctaggtctgccttgctctgttattcacattacacctgtgtctatgtctcgaggtctctaggcacagtggtttggccctagcactgggcaaggtactgagaccacaagtacacacacacacacacacagaggcacaggcacagggcactttggccagggcctgagtagtcttatggccccggggcagggatgcgtaggaagatggaggcactctgagggaggacacaggctgttgcagaggcatggctgaaggatctagctgccacctcctcaagctctcagatctctttcccaactgcaggtctgagtcaggagatgagcaatttccaaccatttgccgtgaagatcctgagatacacggctacttccgagacccccgctgcttgggggaacaggagtatttcagtagcgaggagtgctgtgaggacgacagctctcccacctggagcaggtgaggggctcagcctgggcagagctcagaagaccagccgtcctctactctgctcctgttgagggctcagagagccacacacactcaggattcctctgacacatcagggcaggagttcaagtttgccttatttcaccctgggccccgggggccctcagaaaggctctggccctgggaactggacttccacggtttcagaccctgccatctcagatgttagattgttttagggggtgggtatttcgaggcagggcctctctacatagcactggatatcctggaactctgtagaccatgctggcctagaactcacagagatctgtgtgccttcatctcaagtgctggggttaaaggtgtgctccactacacctggcctgagagatgagttcttattaactgacataggaacaccagcctcagctatgtttgcatagcatgctggctggagtctcagtgactcctgcttcctatgccaatgaaagggcctcctgaaggtatggggacaagaggtaggaacagcttccctcaagcagaggtgcctcccccaacttctgtcctgcagaaagaatgctgctggctaaaataggcattgtacagggctggagatatggttcaaggatgaagagtgtttgccgtacttccagaggacctgggttctgtttgtagccccccacatggcccgtggtgctaacaactatcacttaactccagttccagggagatctgatgccctcttctggtctcaatgggcattgcatgcacagagcacacatatatgctcacaaaacactcatatatataatatataaataaataaatcttttttaaacataagacacattgcagccagtactggaggacaaaattacctaccccaatccttcctgacccgtgactcacttttttcatcaggctggggccaccaggttgaaatggtgctatggctccttgcctggctcctgagacacagcctcacctttacctgtgctctgacaggcccttttccaccacctcccaccagcgcccaacttccacattcactgatttggagccacatggacctatgtacaccccacctctggggcttgtcatcccaggtctccctctcaggtgtcctagccacccctgctggtctcagtctactttaacagcagcagcaggccagccttcgcatctctcctgtttggaactgaatcatgcccttcaaacaagaacccaaccgtggaactcaccactctctcccactttttacattgtactgagcctgcacactgatggcatgctctaagctccgtgtcctgccgggtacttggagagggcagctccttgggacagaggcctccaggagacgagtaaagggtagccagttgacaagctttgtgtgatcaccattcgcttcgggcctgagggtgtcccaggcatgaaaatgactgccatgtgtcttattccaagcctccagctccaatctccggagatggtccttgttttctacccggaagtttccaccactcataagacagggcttgtaggagttaggtcaagtgttcttgcccagaccctcacaagtgccttctcatgttttctctcactaactgccaggcaaaactacaactactacaacaggtacccaggcagctccatggactttgagaggccccgaggctaccaccacccccaaggcttcttagaagatgatgactctcccactggctatgattcacggagatctccgaggagacgtcttctacctcctaccccaccatgtgaggccagctttcttgtttagggtggagcctcccagagggcaccatgcctgtccccatcctaaccctggattaataattgatgtgtgttaccagggaagtgctggtaactcctaagaccagccagtacctggatagacagtgctttcctggcccaaagcaaaatgggggctctcctttctcctgtacctgtagggtcatccccaaggctctgccaacccctagaagggcatttgaactttgccaagtatgggtgtttgatgatggtaaagaatatccattttttgtgtttcggaggaaagaagctaaattgaggattctgtttaataaccaagaacagtcgaaacacaggagctcccgagcctgactgagcacacaggaaagaacatgggtggccataccccaccccagctgccacggcctgctgggagtctagtcaaatccatttgagtgcttaatatttaattagccccaaacacatgctgctaaatgaagcctttccttaatccatagataccaaacgaaacaggtgtaagtgaggcccagcaggggtctttgccctttggttcctgccacccctcttccaggtctgtgtcttcacttatcccacacctacatggccaaggggacacttgagtgccctggtcccagggcagtccagtttgcagacctgggcgagggggaacatggctaaactggcctgtatgcttagccattgggagtaggtaagggcagataagtgaaagagctatgtcttacagaggctgtagtgcaaagctcactggatgaggggacccggggcttattttagcagtagatcctgaatggatgggaggggctgtttttcttccaattccaaacagctggcctgcctaggtcttagggtctagaggttgtgccgaccgagagggccgttttctgtggttgcactggttagcaggcaaggcgtggtcctctttataagtagtaccagctcacctgggaggccctggcatacccctcagtactgactgtttccactccactggccattgctggccagccaatgaccaggcttggcctgttcttcatcgtggacctggctttttgtgaagtccagggtgtctgggaggcctctttggtccagtgtctgaggatccactaaccgagggcttgcagaagcctagcagtacagaaagtacagttggagtaatgcagagcacaggtcggggatggggagggagtctccctgaggcccacgacagggtggacaagcttctaggactcggctgtctttgccaaaggatcccagaacactaagcctggtacactataaacccagaagctgtggaccatcagcgagcctctatctgcaactgctgtcagcacacagcaagtacttagatacactcacatctaggctagggaaggtgggttctttctaggcaaagaatttggttattttccccggttaagctggttgacggaatccctcattttgaaaacagaggcttaaatatggggacctcagaaagatgcagagtgtttgtagggcagagataggatagcatggtgcgtctacgattctagaatggatctctacaatacattccggggcttgtaacttagcacagattccactgggctgcctgagagcaaacatttgaagtgattcattgctcccttatcgaaacgtcccacagctggcttgctccttttagccttcccatccctagttggggcattatgtaattgtttctcttggatgaagcatgtggcctgcttcttcctggcctccttgctgaatgcctcagaaagtagtcttgactctcaggacacattgtccagacagaatttatatcactacagcatcctgtgcttttgctccgcagcccatcggaggtcctccttcaactttgagtgtctgcgcaggcaaagcagccaagacgatgtccttccatcgcctgccctgcctcaccgcgctgccctgcccctgcacctgatgcagcagcaggtgagctgctctggccccacctgggatgcactctcccctggggatacacatggaggaagcaaagagcctgccccttctaatctgcttatccttgagcagcccttcctggtagatcccccagggcccattctgctggagttgcacatgcagcaaagggtggaccgggcatccttggatccgtgcttcctgtcagaggacactggtatagtctgagttaaggcaattacagacactcataagagtcccattgatggctgctgctactaattattccttcagagaggtggttccaccatcaagccacttgggcagcttcttgtgcatgaaccctctgtccatgagagtgggttaagggggcccacatgctcacatgaaaggcaactgagcctgttcaccagggcttaaggatagaggtatgcatgcattacatatatatgtgtagatatgtatgaatacatacatattgtcttaggatttcgttgctgtgacgagacaccatgaccatgacaactatactcttagaaagcaaaacatttaattgaggctggcttatagtgtcagaggttcattccactgtcatcatggcagaaagcgtggcagcatacaggcagacatggtgctgtaggaagagccaagagttctacatcttgatccaaaggcagtcaggaggaggtgctcattccacagtgagcagagcctgagcacaggattgtcaaagcccaccccaacagtgacacacttcctccaatagaccatgcctcctaataatgccaccctctgggccaaaccaccacacatacagtctttatatttcctgaactatctcatcagaagagctgtgtgggctgattgatgaagggagatgtcagaaacctgcacccagccagccagccagccagccagcagatctggatctctgtgaggttctgaccccaagctctaacccatatgtactcagtggccattgcagattttctagtcacctctgccagcacttaaaatatttgttttggagttactttattttacatgcctgcatatgtgtctgttcaccacaggcatgtctggtgctcttggggtttagaaggcatcagatccccagaactggagttacagatggttataaactacccatgtaggtagtggggattgaacctgggtcctctggaagataaattagtgagctcaaccactgagcccatttgcctgtatcatcatggaagaaagataaactttttggaaacccagatcactcgatgccaaacctcagacagccaaggaggtctaaaagaggcctgtgacccacagggcagaatcccaagtcttacctcagccactggcctgggttgtcctggattccttggctacaactacagtgtcagtgcaaaccggcattagcagacatctcaaggtggctctcccatgagggacatgtgagaatcgtgactgtgcccggcatttcagggcacactcactgcaggatggcaggccttagagccgagagacatggttgttgtcctgaatgagccagagtccctgaagtgtgcttcagtactgaagcctggagaggcctgggtagtatgttcacacatcacagcttatccatcttccctcctcatccccaagtggttacgtaagttagtaactgacagttcagtcatagagaaggccctatggcttggagaaagaggaagcccagtcttttttttttttttcactttcacattatgaagtttggctgccaattcgtatatatgaatgcatgacagtgcaactttttttttaaagatttatttattatgtgtaagtacactgtagctgtcttcagaagagggagtcagatctcgttatggatggttgtgagccaccatgtggttgctgggatttgaactcgggacctttggaagagcagtcgggtactcagagcagtcgggtgctcttacccactgagccatctcaccagcccggaatcccagtcttttattaatccctggttccctggccagctcactgagtggcctctgctacacaggcatcttcccccaggtttttgagaagcatctctgcacagctgccatgtgccagactgggaccaaggctcagacctctctctgcttctcccgctcagatcatggccgttgcaggcctagattccagtaaagcccagaagtactcaccgagccactctacccggtcgtgggccacccctccagcaacccctccataccgagactggagcccatgctacacccctttgatccaggtggaccgctcagaatctatggaccaggtcaatggcagcctgccatccctacaccgaagctcctggtacacagatgaacccgacatctcctataggactttcacgccagctagtctgactgtccccagcagcttccggaacaagaacagcgacaagcagaggagtgcagacagcctggtggaggcagtgagtatgggtggcctttgacctctggacaaatcttaggtggcagcagaaacagagccatgatcacatggggagggggcagtggtgggctctgcagccttgccacccgagggtggcctctcggcagcatttaaggcctgagtgaaaaccagctggcactgccaagtcccaccagagagtcccatcctgcagtgccagtctgtgctacgtccccagtgctttctctcttgctcagccttgtggagccactcagctttcgacaccaacagagctgagctcatttatggttagcatcgtgtataaagtttagcagcatggctgacagcgtccccagagcatgccgcgcactgagagctgatgcagaccttccctcatgccatcgatctatctcctatacaggtcctgatatccgaaggcttgggacgctacgcgagggaccccaaatttgtctcagcgacaaaacatgagattgccgatgcctgtgacctaaccatagacgagatggaaagtgctgccagcaccctgctcaatggcagtgtgtgtcctcgagccaatggggacatgggccccatctcccaccgccaggactatgagctccaggactttggtcctggctacagtgacgaggagccagaccctgggcgagaggaagaggacctggcagatgagatgatttgcattaccaccttgtagcccagtgagggcaggctggctccagccagagacgggcacgggagggccagggataaagtgcctcataattaggaaagtttaggcactagttgggagaaaaacgctcaattagacttttgtacaagtgatttcatgcctcaaggaagccataaacctggtaggagcaggttctgagcggcctggcatgtgctatgtcacatgctcaggcccggcctcagaagacagtatatctggcctgcacagaggccagagggctgcccaggagttggtgtctcccatccagggtgcatgcccatgcccctttgcctgcagacatgagagaggttaaaggtgatgacagtcaccacgcctgtgtcattacctcaaccattggtctagcatatcagacacccactgggcctggcatatccatttctgagccccctcccccaacacactggttcctggtttctgtggagctgttctgaatggtacacatcagaacccagccactagtggtcacgacaaggggagtgggaccggatcgttttgttaagcgatgccagtttacataagagaccatcactcagacggtcagttctgtcacattaagggcaactgtaaactggaagagtaccgcacttgcaaaccaggtaaaacttagatacgtttagtttgtttaaaaattatagatttactgtacatgacttgtaatatacaatttgtatttgtaaagagatggtctatattttgtaattatcgtaccgtatttgaactgcagcaatatccacgggtcctaacaatcgtagtttcccacccaaacctagaaattattagtatttttacttgggctaaaaagaattaggagaattagagccaattctcacatgttcagtaaaagaatctttggggataaacttttgagttcctaagaacttggcacttcagaacttttttctaaaatattttgagttactataaacctatctttccgtaagatatcaagttgactaatttgcagtcttttctttgggttctatgattttatagtgcacctcccacccacatgggttgccgttgactttggtttggttttattttcacaaccctctggtcagttagttatgcagcaggtccagctggctactcggcccagtggcatccactggtctggctccctcagttgcccacgcaggatgcttctgggtctctgacgtggagctgcacagatgagctgcccacgtctgctcacatccccaaggatgcttaagatctaggaggtataccacaggaggggagaggggagcaccgtggtgtcctgtgaatgcaggtggtctgtggagtcctgtcgcctttcacagctgctgtgcaggattctctttgagagctgtcacacacagcggagcaagggctgaagttttcacgagaacacaagcgctctgactgcacacctggggacagttagctttggaatcgttagaactgtcaagatttcctgtcagcatcatgagatctcatcccatcactttcctaaggattctctgcaatcaaaaatacaggtagcaatttgggttcaaaatttttaactagtacacagacaacctgtggaaacaatttttttttttgtaaataaattttattataaagacctcgcaaacctcttcggaagacattcttactccagatgcaggcaaaaacacttcaaggtttgtaaatgactatttcctgacataaagcctttttttttttattaaaatgcaaaacgttcttcagaataaactctgtataatgtcatcatatggggagctctcctcacacagctggctctactgggggagcttcgggcggctttttccgcccttggtctccgagaccgatagtaacttcacaccagctgcagagtgctgttctcctaaagggctaaactaccatcagcatttaccttggactctgtcgtgctgggtgtctgtctgtctgtctgactgtgcgacgtaacatcagcagatcacactcacgtgtgttctggaatgggtgatcgttcccaaagtcagctgtcaacgctgcctggcgtttcaggctgtccttcccggtatgtctgctttaagcctggttcaacctctcatttaatattaaatttctctttgtaagaaaaatttgaagttgtagagcatggttttttcctcccctttaaggaagttttaagactaaatagttctgctttttggttttcctaccctgccccacccccccctgatattgaggtctttggaatgctgcttttagtttaagctcctgcttttaatgacattaaaaggtggaagtcactatgatctgctcaccgtcagcaagaacctcatttgggatggtctgtgaggtatgtggacttgtgctccatagttctagaaggttgagggtgtagccctagccacttgaagagagcatagctggggtgcactacccacttcacagtggtccagctcttaagccagatcggctctattttgtgctgtgtgctttttactatctacgatctttatcagctctgcctttacttggggaggatggagtgttggtttacttgtacaaacaccaccaaatcatgggcacctctcacaaaacccactccagctgtgctttcccagagggcagtggagacctagggagaggctcggtctctggcttctgatttcagaacaagggtgaagagtgtggttgaatatacaacagcccagccagcaggggcttcgcaggtcaccagcttgggcctaggaggtaggtcatgttttccccgcccccctccaaatttgaagattaaaatctttgcattaggtttgatattgtggtagtttataagtggaaatatgaaaaatcttggggcctgagggatgtagtatggtgggtgagaagaatctatttgaatgtatggaaatgaggcagggctcatgtgttacagtgtccccaccttctgcttctatgactgtgtctggtcatgctggcaagttgtccctgtctccatccatgatctgtgaccctgtcaggaacacacttggccaacagtgaggtgggcccaagtcccatcaacacagcagggctccccacagttctttttggtgctaggggtcaaccctggggcacatgcttgctaggtgtgcaggtactggttttggcaacatgtggccttccatgattggggtattacaggctctttgccaaggagcctacttaactaagcctttccagtttccccaggagactcagtcttaactgcctgtgtgaaccccactttagaacggaagcaggactgcaccattctaccactctgtctcccttgtggcactgggacttccagacaaccccagcatgtggattcagcactgcaggcaagactctcctgcgtgttcatccgttctgtttgggctggaacctggaatagctgtcggggcttcagcgaggatccctccaaacctcatgttctgtcccgatgtcgccatctgtgagttctgggcacgtaacatcgacttcttgtctcgggaaactcgtttccttatgtggctaaatcatgtcagcacgtgaagccagcctccctatgccgaagtgagagaaaggcccgactgcaactgaggggcacgccaggttgatcttcgcttattctcaaacgccgctgagcctgagaggagaacatggccctcccaggggtgacacctgtgctgctaaagatgctacggatgacggccgtctaacacctgccctgtgaggatctcttggcagacctaggatttccttgatcttctttttgaacaggaaaaaacaaaacaaaaaaacaaaaaacaaaaggcaaagcaggtaagatgaaataagggcaaccttgttttcaaagtaaaagtgttggtttataatttgttttttgaaccctttgaagggtcttctcagactcagaagtccagaaggcagctcctgccagtcaaccctaggggaccctggaatcctgctatttcctctctcttcttcactcagccatgtgatttctatacagcgatccctttcttcccgactacagatgatggctttggacatcttcaggaaaactaacctacaatgcgtctgacccccattctctcataagaacagttggaatgaggcagcttggctcaaaaattaagttaccggttacatccaaatttatgaggaatttccagatcaaagagctcttgtaaatgctgctggtatctgctcccctgacccaagactcgaattctagctggtttatctttcactccaaagtcctttgctgttctccatcagccttggtgccatgctctctgttctcacgtctagagaataagaaacggccagccctgtctgcagaagtagctctggtgcctgggccatttctggggccaccatgaaaggacctcgtgggctcatgtccttggcatgaggtagtgactggcatgtgggactggctctatactcctgcacttttgtgtggtaagggttaaacaataaaacctttggcagtgaggccaaaatggccttttcttgaacaacgtcctgcaagcctctcacctggacggtttcatgagagccagagtggtaggcgttgagttgtgcagtcacctgagccctcgtccctgtgcctcgctcttcagatttaaatcagggcaggagagaagtgcagagggggatgaggcgtcctctagctgctgcctgtccctctaattggggacataagctcaggtaaccagcccagctgagctgctacctgcctcttggcttcagcaaaagcttccttggagagcccagtccagttcaaccaccctgactttgcaggaatggcctcaggtgggagaccagggaaaggatcatcccagtccttcctggaagcagagctctgaactggagacaagaaaaccatgttagctaccccacctgctacccgcaggcagccagggggagggccccagcttgcttgctaggctttttgtggaggggcatcagagagacactgggaaaagggacttgcctcactgcctaccatgacctcatttcctcagaaaccatgaaagtctgagccaagagtcggggtatctgggtcccgagtgtctatataccggttcagaaatatctagggcagggctgtactggctggatctcttggcttggcctgagttcctctgtcgtcctcaggcaatggctgtctgtcttaacgctgggtgtccagagtctggggcttgtagacaggaacattcttgtcctcaagtgcagggtgtcccttaataatgtcggctgctttctctgcaatcattaccgtgggagcgttcaggttgccgctgaccacgctgggcatgatggaggcatcaacgaccctgaggttttctacgccgatgaccttggtttgcgcgtcaaccacggcagtggggtcagaggaccggcccatcttacaggtgcacgaggggtggtaagcactgtctgcttttgcccgcacaaaggcatctatctctttgtctgactggacgtggcttccgggctgcagctcttttccccgaaatggagccaaggcttcctgggcaaaaatttctcgtgacagcctcacacactgacggaagtcctcgacatcggtttctgtggaggagaaataagtgaggtccccttctcttactctgctggccaaaccaggggacaaaggtcagggacatggagaaccaagctacaagtgctttgttacctgcccagaggcagttagtggcaaccaggtatcttagacaaacagtgccaggtttgtgtctgaggtctggcatctctgtaagccaggggtagagatgtatagtctatctctactgccatgttcctgggaggtaagaccttgatcatgaggcatgagtctctgtggtgcgtgcaaagaggcaggcttgggaatacagcgtgctctctggcagggaaggccaggcaggtagtatgcacaggcctggcaattgttcctcctacagacgggcctgaaagtggtacctctatcctgctgtgctgtgaggcccaggctaccttgtgtgacctagaactgagggcaacccgagtgttaagcagtaggatccagagtaagggtgagggacaaacggaaccttattaacattccctaactcgatggcaggcccaggggataccaaagtagcgtctgtgttgttacctgttgacaagtagttgggatggatcacagggtggtcccgggggttggcacttctcagtttcagccagcccacacttgtggccctcatggttcccacgtgcacctagaagggttcagaggtaacagttcacagtaatctccattagctacagctcagacacttagaggagccccaggttccctgtgggtgggcactcagcatttagtgtacagacctccatcctgtctggcctttactcctttgtctgaaacgttcatgggacgatccccgggctgaggaagtcactgtaacaggtcctcccccccccacacacacacacacacatcctgtgggccgacccctgggctcactccctggggtgagtaaggttagggctccctttcctcctccagtcagacagtaggcattgtgggcagagtactaaacggaggtctccatggtgggatagataacatcaggaacatctattctaatgcaggagcatggaggcagagtctctggccatggctggctgcatacctggtaagcttcctgctgggtgggtttccgcccatggtcaatcacttgcgatggcaggaagtggaactggatgtccggatgagggaccccaggtcggctgcggatgaaccctccggtctcaagatgggctgtggctccgtcccctgaaggtcacatgaggacaaggcagaagagctggtcagggtacagcagatggcccagctctgcccggtgtccctcttctcccctgtgtctatcttcctggcctcggggctcggcaccaggttcgtccataaccttccttcattccccgggcagccatacccagcgttacaactttaaaaacactagctccatgctaagcgaggggcgtcaggtctgccaaggccacttgtgttatgtgcccttcgtcttgctgctcagtgagcgtcacctcgagcaaggtcctgtgctcagtccctcgacgtgtgctactactgcctcttgtacccttgcagagacctgccagacaggacctttgtgccctcacctcacagagtggaaaaattggcttgggttgtcaactggctttatacctagcaacctgaggcccgtcttggctcttcaggaagaaaaccacgatgcccacagaccgtagccaccaagtaccccaggaggcagcccccacctgtgtagctccagagccactccaggccgatgcagaccttccgcagaggcttctgggcagagtggagggtgatgggctgtgtgcacgcttgctgaacgtagacctccaggtggtcctgcaggttctgcccaactcctggcacaggaaggaagggttaggaaaatggctgacacaggggtgaacccctggctttggaagcttctctctagtccgctttgtcttcctgcctgccctggcccccagcttggaagttgtttccctgagacatgtcttttgctctcttagacaagtctggctctttctccaatgctgctaaaaccacccactctgtcactctctctacagcaatcactcaggtgcccttggtcagccctcctcagcagcgccctccaaggacagggcccacagttacaacaggtacttgggaagtgtcactgtgtgtgtgctggccaggttgacacttgtcagctccatcgtctcccccagcctgttaagggagaggcagtcccaacagaccctactcaagctcatgcaagatcaagggtacactgggcagtcaggacacagactgcttccataggcctccaggaaagcttcccgagaaaggccagccctcagggacacaacacaccctttctaagatgaagcttggatcttcacctgaacagtggcttgctctggagccataggttggcctcatttgtgcttagagcaactggtaaatcttaggatagatctctcacaccacaaccccatcctggtggtaatctcagccccatgcctgctacaggatgctctcctaaagggtgcagaagctgcctgagggagggtgaaggaaaatagcataaagacctggggttctccagtgagacccagatgccctcagatgtataggaaggaaggatgtgacaccttcaagaagtatcccaccgccacttcaagcaacaggctgctaggttggacagagctaccttccgggcagcagtcagactcaccaggcaggtggcacaccacagggatatccagtttcctgaggtcatctgcattgccaacgccagagagcatgagcagctgtggagagttgatggctcccccgctcaggatcacctccctgctgacgtaagcctggaagaggcagagctcgaccaatcacacttcctgaaaagccagctgtttgactgccccgtggagaggcacccagttccagccattgctgggcctttggaaattacaccactgtggagaatctgttctcagatcctagatagagaacagaggagggggccggctggagggctacttaaaaatgatccgcacagagtccccatgggtgactctaagtaacagctgtaacagtaacgggggccttggaaatggggggtgggggtagagctcaagtagatgatagcatacacttcagtgatttgaagcaagcacacaaatagatctcctgagaagggaaggcgggggaaggccatctctgacatatcgccaagtgaagaaaagcaccaaatatgattccatttgtggatttttaaacttctagggttgatttaatggtttctggcaggccagaccctgaaaccatatactagaggactctcgtgggggtagatgtgacaggcagaggcttacggaggcacaagggaccatggagtctgcgggtggcaggagttgaggtcttctgacctctacatcctgtgggaccccagggacaagcctgccactgctactggctgtcaactcatcctaggaacaagagcacgtgggacaggagcaagagcctgattgcctgtccccttcctgccctcttcagtccccacacgttccacaggaagtcaactcaccttgtgtctctggccgtccttgatgtactccacacctactgcacgggtgccctcaaacagcactctgcttacaagtgtctggacctcggccctgaggttggggcggctcagcaccgggtgcaagtaggcgcaggctgtgctccagcgcttacctgcaggatggagcgaggtcagccatggcctgctgccctcccctcgtgcctggacacgaaactactggggaaagcaaatctagccctcccttgacaatgcaaggcccaccttcaaaggtatgtctgtgacctggatagcctaccctgcagtccaaactattgagagccccatggtttgctctatcctgctgtgtgcaagggtcccgtgctacctgctgtctgtctacctgcatccatctaccaagaggtgatagctgggacacgatggtcttgtgctgtctctttctgcctcagcttgctcatctgcaagtctctataacgccatgcgttattcattacacagagctgttccttcactcttccacagcccctcccctccaaccactacccctagtggggtccactgtgttttccctggctacaggtaccacaggactgaagtccctacccctctcagcttcctagatctgtgactatagggtttggctgccctatccaggctggacaggcccctgggaactctaaagtcacctctgctatactgcatgacctagaggcacagtgaatacccaagtattgggttgtatcctgtgatacctaggggccgtatatagtatctccctctcaccaaacaccatgctgatttgcttactgaccatgatggagtcaggaaggatgcctataattagaggtgggggctattaaaaatcagtaccctgggggctagagagatggctcatttgttaagagcactgactgctcttccagaggtcctgagttcaattcccagcaaccacatggtggctcacaaccatctgtaatggatccggtgcccttttctggtgtgtctgaagagagctacagtgtactcgtatccattaaattttttaaatcggtaccttggtggacagtcatgtccatccagccgaagccctcctgttggaagccattcatgtcttcagtgaaggggtagccagcctgacgtgctgcctgcaggaaggcctggtgaagcgggtggttggtcttgccccgagacacatgcagtgggccatccccaccgcggtacatattggcacccagctcatgtctctgcgccttgcggaagtagggcaggcagtgtgcatagtcccaaccctcagcaccttcacggtgccagcggttatagtcctcggcgtgtcctcggatgtagaccatggcattgagggatgaggagccaccccagacccggcctcgtggccagtacagcacgcgactgtccatgccgggctgaggctcagtgtgatagtaccagttgtatttgtcatcacacaggttggacacaagggcagccggcatgtggatcttccactgaagccgcttgctccccatcaacaagtccttaggtcctgcctctagcagcagcacccgatgattcgggtcctcggtgagccgactagccagcacacagccagcagagcctgcgcccaccaccacaaaggtgtactcatccttgcccacactggcaacagcgcggctgcaaggggggcatggctggccctgcacagcccatgccagggctccacgtgggctctgccatcctttcctccagcctctaaggacctgccacatgcttccagcccagttcctctatccaccgacaggagttggaagagtcttttcctagaacaggaaacatggttttaagactctcaactccactgcatatgtagaagcagcctggagctggttggttatgcctagcttgggcaaggccatggcgcatgatagccactgccctggggaggtagaacctgaagtagagattttatcatggagatagtagtccagaatgggcgttggggaagaggggaggcccctccacaggcttggaagttgttccctggacaactttcctgagatggccataggaacttggagactgggcatctagctgctaaacgggaggaaggctttccagcctgaccaacaaggggctattctccttacttcaggcaggatgctgcattttattacaggaatgcacaagaaagaaaaaaaaatagaaaagctctccagatggagagggacaaagtaggctgagggactaagacttgggagctcatagcctgagagatcccaggacgcactaggacacagggtcacagccatgctttgcaaggtcaacttgtaaagcggtagctttgacagagaaatgccaatggcctaaaaataatgttgatttgtttttgcttttgagatctttccctcccccctcccccaccccggtaccccatctcactctctttcaaagtcatagcctctttttcttcaatagttgttacgtgtaaatatatgtgattatggaaagcgacctgctcagacctatatatgccaatgacttttgatgggtcttctctcaccaatgtcccacatgcttggtgcaaaggttgagaacagcctcagtatgccactgacctcgtgaggacaagagcagctgaaccccgcaaccccaacaacaacctctagtctaccctgaagctgaaatgaaaggactgaaaagtcccttgtcaactttggcctgcccagatgcagatgatggcaaatcccccttagctttccctcagtcctgtatcagtaaccagggcctttgacaaaaagtggtagggccttctggagcaagaattctgcagagagtcccctccacccccagctccagggtagcaatgcccatgctctgctctcccggggatggactcacttcccccaatgccctcccaggatagttgcggcctttgtaagaggacgccattacccatctccattagactgctacacacgtcagtattccattataatttggaaacacacaaatacactctttacaaagagagaaagcaagcaacagaaccagagcccccaggtgttgtaactatcagacaaagactcaaagtcaaggtcacagctactagaaatgatttcgttgacaagaggacatgttgaagggactttcaagtaggcatcagtggtctgcaaaggtgactctgtgggcaagggcacttatttcataagcctgaggaccccagtttaa

SEQ ID NO: 1209 - DNA, 7660 bp, Mus musculus
gaaaaagtagaatatgccttcctgattatttttacagtggagacatttctgaagattatagcgtatggactgttgctgcatcctaatgcttacgttaggaatggatggaatttactggattttgttatagtaattgtaggattgtttagtgtaattctggaacaattaaccaaagaaacagaaggcgggaaccactctagtggcaaatcaggaggctttgatgtcaaagccctccgtgccttccgagtgttaagaccacttcgacttgtatcaggagtgcccagtttacaagttgttctgaactccattataaaagccatggttaatgatgcgataggatgggaatggccatgggtgtattttgttagtctgatcatccttggctcatttttcgtccttaacctggttcttggtgtccttagtggagaattctccaaggaaagagagaaggctaaagctcgtggagatttccagaagcttcgggaaaaacagcagctggaagaggacctcaagggctacctggactggatcacccaggcagaagacatcgatcccgagaacgaggaggagggtggcgaggaaggcaaacgaaacactagcatgcccaccagcgagactgaatctgtcaacacagagaacgtaagtggtgaaggcgagacccagggatgctgtggaactctctgccgtcgatggcgtcgctggaaccggttcaatcgcaggaggtgcagggctgccgtgaagtctgtcacgttttactggctggtgattgtcctggtgtttctcaacactttaactatttcctctgagcattacaatcagccagactggctgacacagattcaagacatcgcaaacaaagtcctcttggctctgttcacctgtgagatgctggtgaagatgtacagcctgggcctccaggcttactttgtctccctcttcaaccgcttcgattgctttgtggtgtgtgggggcatcaccgaaaccatcctggtggaactggagctcatgtctcccctgggggtctccgtgttccggtgtgtgcgcctcctgagaatcttcaaagtgaccaggcactggacctccctgagcaacttggtggcatccttgttaaactccatgaagtccatcgcctctctgctgttactcctcttcctcttcatcatcatcttctccttgctggggatgcagttgtttggtgggaagtttaattttgacgagactcaaaccaagcgaagcacctttgacaactttccgcaagcactcctgacggtgttccagatcctgacaggtgaagactggaatgcggtgatgtatgacggcatcatggcctatggaggcccttcctcttccgggatgattgtctgtatctacttcatcatccttttcatctgtggtaactgtatcctttggagccactggaactatgtggtcaccatcactgtctcgtttcttctgactttctctgtggttgtggtggtgacggtagcagctatttccaaattagatatcctgctgaatgtcttcttggccatcgctgtggacaatttggctgatgctgaaagtctgaacactgctcagaaagaggaagctgaagaaaaagaaaggaaaaagattgccagaaaagaaagcctagaaaacaaaaagaacaacaaaccagaagtcaaccagatagccaacagtgacaacaaggttacaattgatgattatcaggaagatgctgaagacaaggacccttacccgccctgtgatgtgccaggtattatatgcggcagagaggcccagaagggctttcagatacgtgtgggttgccacaagctcattaaccaccacatcttcaccaaccttatcctggtcttcatcatgctgagcagcgctgccctggctgcagaggaccccatccgtagccactcattccgcaacacgatactgggctactttgactatgccttcacagccatctttacggttgaaatcctgttaaagatgacaacttttggagccttcttgcacaaaggggctttctgcaggaactacttcaatttgctggacatgctggttgttggggtgtcgctggtgtcctttgggattcagtccagcgccatctccgttgtgaagattctgagggttttgagggtcttgcggcctctcagagcaatcaacagagcaaagggacttaagcacgtggtccagtgtgtctttgtggccatccgaaccattggcaacatcatgatcgtcacgaccctgctccagttcatgtttgcatgcattggggtccagctgttcaaggggaagttctaccgttgcacagatgaagccaaaagtaaccctgaggagtgcagggggcttttcattctttataaggacggcgatgttgacagtcctgtggtccgtgagaggatctggcaaaatagtgatttcaattttgacaatgtcctttcggctatgatggcgctgttcacagtctcaacttttgagggctggcccgcgttgctgtacaaagctattgattcaaacggtgagaaccgtcagtgtgttgaatatgccttgaaagcacgccccttaaggagatacatccccaaaaacccataccagtacaagttctggtatgtggtgaactcctcgcctttcgaatacatgatgttcgtcctcatcatgctcaacacgctctgcctggccatgcagcactatgagcagtccaagatgttcaatgatgccatggacattctgaacatggtcttcacaggggtcttcactgttgagatggttttgaaagtcattgctttcaagcccaaggggtattttagtgacgcctggaacacgtttgactccctcatcgtaatcggcagcattatagacgtggccctcagcgaagccgacaactctgaagagagcaatagaatctccatcacctttttccgtcttttccgagtgatgcggttggtgaaacttctcagcaggggggaaggcatccggacactgctgtggaccttcatcaagtcctttcaggcgctgccgtatgttgccctcctcattgccatgctcttcttcatctacgctgtcataggcatgcagatgtttgggaaagttgccatgagagataacaaccagatcaataggaacaacaacttccagacctttcctcaggcagtgctcctactcttcaggtgtgcaacaggggaagcctggcaggagatcatgcttgcctgcctcccaggaaagctgtgcgacccagactccgattacaacccaggagaggagtacacttgtgggagcaactttgccattgtctacttcatcagcttttacatgctctgtgcattcctgatcatcaacctctttgtggctgtcatcatggacaattttgactatctgactcgggactggtctattctggggcctcaccacttggacgaattcaaaagaatatggtcagaatatgaccctgaagcaaagggaaggataaaacaccttgatgtggtcactctgctccggcggatccagcctcccctggggtttggaaaattatgcccacaccgagtagcatgtaagagattggttgccatgaacatgcctctcaacagtgatgggacagtcatgttcaatgcaaccctgtttgctttggtccggacagctctcaagatcaagactgaagggaacctggagcaagctaatgaagaactccgagctgtgatcaagaaaatctggaagaagacaagcatgaagctgcttgaccaagttgtccctccagctggtgatgatgaggtaaccgtggggaagttctatgccactttcctgatacaggactactttaggaaattcaagaaacggaaagagcaaggactggtggggaagtaccctgcgaagaacaccacgattgccctacaggcgggattaaggaccctgcatgacattgggccagaaatccgacgggctatatcctgtgacttgcaagatgacgagccagaagactccaaaccagaagaagaagatgtattcaaagtaattattccacgcctagcgcctcactggccacatggagatagtggggcggggaagcaagctcccacctcaacaaatgccaatctcaataatgccaatatgtccaaagctgcccacggaaagccgcccagcattgggaaccttgagcatgtgtctgaaaatgggcattactcctgcaagcatgatcgagagcttcaaagaaggtccagtattaaaaggtctgagtcaggagatgagcaatttccaaccatttgccgtgaagatcctgagatacacggctacttccgagacccccgctgcttgggggaacaggagtatttcagtagcgaggagtgctgtgaggacgacagctctcccacctggagcaggcaaaactacaactactacaacaggtacccaggcagctccatggactttgagaggccccgaggctaccaccacccccaaggcttcttagaagatgatgactctcccactggctatgattcacggagatctccgaggagacgtcttctacctcctaccccaccatcccatcggaggtcctccttcaactttgagtgtctgcgcaggcaaagcagccaagacgatgtccttccatcgcctgccctgcctcaccgcgctgccctgcccctgcacctgatgcagcagcagatcatggccgttgcaggcctagattccagtaaagcccagaagtactcaccgagccactctacccggtcgtgggccacccctccagcaacccctccataccgagactggagcccatgctacacccctttgatccaggtggaccgctcagaatctatggaccaggtcaatggcagcctgccatccctacaccgaagctcctggtacacagatgaacccgacatctcctataggactttcacgccagctagtctgactgtccccagcagcttccggaacaagaacagcgacaagcagaggagtgcagacagcctggtggaggcagtcctgatatccgaaggcttgggacgctacgcgagggaccccaaatttgtctcagcgacaaaacatgagattgccgatgcctgtgacctaaccatagacgagatggaaagtgctgccagcaccctgctcaatggcagtgtgtgtcctcgagccaatggggacatgggccccatctcccaccgccaggactatgagctccaggactttggtcctggctacagtgacgaggagccagaccctgggcgagaggaagaggacctggcagatgagatgatttgcattaccaccttgtagcccagtgagggcaggctggctccagccagagacgggcacgggagggccagggataaagtgcctcataattaggaaagtttaggcactagttgggagaaaaacgctcaattagacttttgtacaagtgatttcatgcctcaaggaagccataaacctggtaggagcaggttctgagcggcctggcatgtgctatgtcacatgctcaggcccggcctcagaagacagtatatctggcctgcacagaggccagagggctgcccaggagttggtgtctcccatccagggtgcatgcccatgcccctttgcctgcagacatgagagaggttaaaggtgatgacagtcaccacgcctgtgtcattacctcaaccattggtctagcatatcagacacccactgggcctggcatatccatttctgagccccctcccccaacacactggttcctggtttctgtggagctgttctgaatggtacacatcagaacccagccactagtggtcacgacaaggggagtgggaccggatcgttttgttaagcgatgccagtttacataagagaccatcactcagacggtcagttctgtcacattaagggcaactgtaaactggaagagtaccgcacttgcaaaccaggtaaaacttagatacgtttagtttgtttaaaaattatagatttactgtacatgacttgtaatatacaatttgtatttgtaaagagatggtctatattttgtaattatcgtaccgtatttgaactgcagcaatatccacgggtcctaacaatcgtagtttcccacccaaacctagaaattattagtatttttacttgggctaaaaagaattaggagaattagagccaattctcacatgttcagtaaaagaatctttggggataaacttttgagttcctaagaacttggcacttcagaacttttttctaaaatattttgagttactataaacctatctttccgtaagatatcaagttgactaatttgcagtcttttctttgggttctatgattttatagtgcacctcccacccacatgggttgccgttgactttggtttggttttattttcacaaccctctggtcagttagttatgcagcaggtccagctggctactcggcccagtggcatccactggtctggctccctcagttgcccacgcaggatgcttctgggtctctgacgtggagctgcacagatgagctgcccacgtctgctcacatccccaaggatgcttaagatctaggaggtataccacaggaggggagaggggagcaccgtggtgtcctgtgaatgcaggtggtctgtggagtcctgtcgcctttcacagctgctgtgcaggattctctttgagagctgtcacacacagcggagcaagggctgaagttttcacgagaacacaagcgctctgactgcacacctggggacagttagctttggaatcgttagaactgtcaagatttcctgtcagcatcatgagatctcatcccatcactttcctaaggattctctgcaatcaaaaatacaggtagcaatttgggttcaaaatttttaactagtacacagacaacctgtggaaacaatttttttttttgtaaataaattttattataaagacctcgcaaacctcttcggaagacattcttactccagatgcaggcaaaaacacttcaaggtttgtaaatgactatttcctgacataaagcctttttttttttattaaaatgcaaaacgttcttcagaataaactctgtataatgtcatcatatggggagctctcctcacacagctggctctactgggggagcttcgggcggctttttccgcccttggtctccgagaccgatagtaacttcacaccagctgcagagtgctgttctcctaaagggctaaactaccatcagcatttaccttggactctgtcgtgctgggtgtctgtctgtctgtctgactgtgcgacgtaacatcagcagatcacactcacgtgtgttctggaatgggtgatcgttcccaaagtcagctgtcaacgctgcctggcgtttcaggctgtccttcccggtatgtctgctttaagcctggttcaacctctcatttaatattaaatttctctttgtaagaaaaatttgaagttgtagagcatggttttttcctcccctttaaggaagttttaagactaaatagttctgctttttggttttcctaccctgccccacccccccctgatattgaggtctttggaatgctgcttttagtttaagctcctgcttttaatgacattaaaaggtggaagtcactatgatctgctcaccgtcagcaagaacctcatttgggatggtctgtgaggtatgtggacttgtgctccatagttctagaaggttgagg

SEQ ID NO: 1210 - protein, 1745 aa, Mus musculus
EKVEYAFLIIFTVETFLKIIAYGLLLHPNAYVRNGWNLLDFVIVIVGLFSVIQLTKETEGGNHSSGKSGGFDVKALRAFRVLRPLRLVSGVPSLQVVLNSIIKAMVNDAIGWEWPWVYFVSLIILGSFFVLNLVLGVLSGEFSKEREKAKRDFQKLREKQQLEEDLKGYLDWITQAEDIDPENEEEGGEEGKRNTSMPTSETESVNTENVSGEGETQGCCGTLCRRWRRWNRFNRRRCRAAVKSVTFYWLVIVLVFLNTLTISSEHYNQPDWLTQIQDIANKVLLALFTCEMLVKMYSLGLQAYFVSLFNRFDCFVVCGGITETILVELELMSPLGVSVFRCVRLLRIFKVTRHWTSLSNLVASLLNSMKSIASLLLLLFLFIIIFSLLGMQLFGGKFNFDETQTKRSTFDNFPQALLTVFQILTGEDWNAVMYDGIMAYGGPSSSGMIVCIYFIILFICGNCILWSHWNYVVTITVSFLLTFSVVVVVTVAAISKLDILLNVFLAIAVDNLADAESLNTAQKEEAEEKERKKIARKESLENKKNNKPEVNQIANSDNKVTIDDYQEDAEDKDPYPPCDVPGIICGREAQKGFQIRVGCHKLINHHIFTNLILVFIMLSSAAAEDPIRSHSFRNTILGYFDYAFTAIFTVEILLKMTTFGAFLHKGAFCRNYFNLLDMLVVGVSLVSFGIQSSAISVVKILRVLRVLRPLRAINRAKGLKHVVQCVFVAIRTIGNIMIVTTLLQFMFACIGVQLFKGKFYRCTDEAKSNPEECRGLFILYKDGDVDSPVVRERIWQNSDFNFDNVLSAMMALFTVSTFEGWPALLYKAIDSNGENRQCVEYALKARPLRRYIPKNPYQYKFWYVVNSSPFEYMMFVLIMLNTLCLAMQHYEQSKMFNDAMDILNMVFTGVFTVEMVLKVIAFKPKGYFSDAWNTFDSLIVIGSIIDVSEADNSEESNRISITFFRLFRVMRLVKLLSRGEGIRTLLWTFIKSFQALPYVLIAMLFFIYAVIGMQMFGKVAMRDNNQINRNNNFQTFPQAVLLLFRCATGEAWQEIMLACLPGKLCDPDSDYNPGEEYTCGSNFAIVYFISFYMLCAFLIINLFVAVIMDNFDYLTRDWSILGPHHLDEFKRIWSEYDPEAKGRIKHLDVVTLLRRIQPPLGFGKLCPHRVACKRLVAMNMPLNSDGTVMFNATLFALVRTALKIKTEGNLEQANEELRAVIKKIWKKTSMKLLDQVVPPAGDDEVTVGKFYATFLIQDYFRKFKKRKEQGLVGKYPAKNTTIALQAGLRTLHDIGPEIRRAISCDLQDDEPEDSKPEEEDVFKVIIPRLAPHWPHGDSGAGKQAPTSTNANLNNANMSKAAHGKPPSIGNLEHVSENGHYSCKHDRELQRRSSIKRSESGDEQFPTICREDPEIHGYFRDPRCLGEQEYFSSEECCEDDSSPTWSRQNYNYYNRYPGSSMDFERPRGYHHPQGFLEDDDSPTGYDSRRSPRRRLLPPTPPSHRRSSFNFECLRRQSSQDDVLPSPALPHRAALPLHLMQQQIMAVAGLDSSKAQKYSPSHSTRSWATPPATPPYRDWSPCYTPLIQVDRSESMDQVNGSLPSLHRSSWYTDEPDISYRTFTPASLTVPSSFRNKNSDKQRSADSLVEAVLISEGLGRYARDPKFVSATKHEIADACDLTIDEMESAASTLLNGSVCPRANGDMGPISHRQDYELQDFGPGYSDEEPDPGREEEDLADEMICITTL

SEQ ID NO: 1211 - DNA, 338780 bp, Homo sapiens
  misc_feature (1)...(338780): n = A,T,C or G
tttggctattctgtcacatcattaaaagtctagtctgtttgtgatgtagtgtgtttgcaaaaactctcccatacaccctggcattctttgttaattgccattaaagtcatgtcaggttttgaaaaattatggtgttcttgacactgttccctttcagcctcacgtgttccttgtatttatcacaatggaacactaacaaatatttattcagttttatagacatgttgacaataaagtctaccatgtgtgtctccctgccatggtgattattttgctcaatatgtgattgactgagatttttcagtgtattataaacacacattaaaaataggaacataaaaaagataaaacagaaaaatggaaagttccatatttctggatgcaataccatgccaacctggttattaggacacgaaacagataatttttagtgagttatctaagtttgtataatgattcttcttcaaataagtagttttggatcccataaccttcctcttcaaaaatttctcgaattagaaccttttaaaaagtactttttcctctgtgtgtttgttccaataacctaggaaatataaagtttggctattttaccaaactttcaaacccacagtccaattccaatttttagcatccattttaaaccataagcatgaagctgcaagaggtcactgcattttcatattgcatttttgtcaaacagaaagagaactactgaagtggctaagtcctctctactgtgttaatcaaagggaatagaggggtggtgcttatttcaaagggtcttattagaaaactgggattacaaaaggtcaatatttttaatgatttcctatttaatgatcctccaaagtcctgtttaacaagcttatgtcagtattaaggatttgtgacttagtgtttttttttttttaagtagtaagaaaggtaaacaggtccacatacatggtaggtgccaagtcggagagacactggtgccatttaaacttcagttttgttttgtgaattaaatatttaaacaactgctctgaagaaacaaaaatgtaactgtaatgtttgaactataaaatttctgacgtttattgactttctggatctccctaacaacttcctgtcctcataaatttgctcctgtggttgattggatgcagatctgtgtgattttttcattgcagtgtgtgactataccagttttatttccggtagctagcttatgcttttaacctggagatagctgtgtagtggtgttgactgaaaccagtgttgtgtggggtgtgtgtatgcctataattacattcagcatgagccatggggctgcatttatgtgcatgtgtgtaaatagctatttcactatgatctctgtcctgctttggggttgtcagcattgattactgaatcttaaatactaaataacagaaattaaaattaagcaaaattcaaagactattaaaaaaaaccactgtgttcagttgctttgggactgtatttgaacgacagaatgcacttaagaaaaaggagagccattacagtggattgtattaggtcggtgcaaaagtaattgcaccgacctaatattttaattgaggtggtgagttaagttctaaagtcaggacataaaggtaaaaactaagaccaatcaaaggaaggacagactcctgccagcaccacttaagtggctccctccgtccctctgtaactgagtatatttaaattcacatgagttatatgatttaacttgatggtatgtgtcagaagctctgaaacagtattttaaatgtttgcaatacataaacaagatgggtgatattatccctgttttaaaggtgaggaaactgaggccctaagagggtaagtgacatcccccaaacaacatagctagtagctggcagagccaggatttgggcccagttctatgtgtctccaaagtctaggctctccagtacgccatcctagaatgtgaagaactcttagggatcatgttatataaccagtttatttcacagatgggaaacttcagacttattccctcctttcagtcagcatggataatggggtgttgactgcatattctagactctgccaggatttcccaactctggaagtggagagtacttggtgcatcagagagtgatggataagatttaagaattgggtcaaaggggatgggaatgaaccagttaaaggaattggaattactttgtctgatgtgaaatgtaaatcctattcttcgagtgaacagtcacttgatgaaggataaagaccagctggactccatgcaatgaggccaaagcaagaagaaaggactttaaattttgctgggtgaggcctaagtcagttgtaatggagaagtcctgatggtggtggggtatggcggtggatggggagagtagcgagttagcaccatggggtaggggacctcactagacagtaagctgccctctgctggcttcctgttttccctgcccaatctcagagtagcgccgcccctcacagtaactaaagaaattcatcaacaaatcttgtattgattaagacaaaaagtgacatcttcttaatggatccatcagacctttctgtgctctacaaatcttttcatcctctgatctaccttgcccactaaggttagagctattttcatgaagtacgactgattccatttctctgctcaaaaatgaaccaaagcagcctgagcagctgttttcaaagtgtggtctatggacccccagaggtaaggtggccaattgtggcaaataaaaatacagaaagcccaaggaaatttcagtttcaaataaacagcttttttttttttttttttttagtgtaagtatgccccatgcaatatttggacatcctgtattttatctggtaaccctacctgggggaccaaaaggccctctctttgaggtcaagactattttcacggtaacattaagacttatttgtcttccctaatgtgttgacattgcactgatggtacaaaatcaacagtgtttaaaactgctggtgtcttagcatgaatcagggcagtgacaccaaagtgtactggtggatgctgccttattctgtcatgcactcactgtaaaaaaaaaaaaaaagccagttttacttaataatctccttgatgaagcagtaaaaataattaactttattaaatcttaatccttgggtagatgtctttttaatattctgagtaacaaattaggacaaatgcataaaacatttctgctgtatatgatttcctcacttgtgtgatggtttgaggtaggaagctgaatggctttttcatggaacaccatttttactgaaaaactatgtttattcagacctaagtatttggcagttattttcttgaaaatgaatgaagtaagcctgttactttaaagaaaatcttgacagtatttgtgccaattacaaaatttcagctttcaagtgaaaattagaattttgaaaaacttctgtctaccacagggagcttgacagtttcccaatacttaaagactttctgatgagattggtggtgataacaatgaatgtggctttttgatattgtataatgaaacgtgtcaacatttggaaaacctgtgtaactcagtgaaccaggattttccaaatgaccaatgcataatgttaccaaatcatgcatgggtaaaagatccattcaaactgtgaaatagactgatagaatttaatgtaacattgtagaaagtttcactgacatggtttgaaataacacatttcaactaacttttaaaagtcaagttttggtgtcatggcaaagaataatatccacgattatctgaaaaggcgattaaaacagtcctcctatttccagctatatacctgtgtgaggctgaatactcttcacatacttcagtccaaacattctatcactactgattgaatgcaggagcacaaaggagaatccagctgtcttcagccagacagtgaagagatttgcaaacaataagaacaccactcttctcaccattttgttctggaaaacagttacttttcatttttaaaagtatgttagaacacgtaatgggcttgtgactattttcaagtgaattataaatgatttaaaaaatgttctaagccgagtgcagtggctcatccctgtaaccccagcactttgggaggctgaggcaggagaatcatttgacaaagcgagacccccatctctacaaaaaaattttaaaaaaggttgcagtgagctgtgactgtgccactacactccagcctgggtgacagtgagaccctgtctctgaaaaacaaaaacagaaacaaaaagctctttataattgttaggagtctaaagaggtctgagatttaaaaaaaaaaaaaatcagaactgctggggcagggtaacacctagactgctgagccagacactagggacctgacactacttactctgtgctgcctttgcaatcttccttatcaccactatctcttaagtccccctaggtcccagcctaaccatttacttattaatttctgcatgtactctggacttctcagcctgactttgtgcatcccattcattcctctacctggaacacatgtccccacccgcttaatccgcctgttctggtggttagtgggtcagggctatcccctcttagcaccagggcctgtggatggaggaactcattcaaacccaactacacagtttgtttaaggatatgttctgcatatagccttcaggatctgtttatcttccttaattagaattcctggtgtgcaaaggacccaattttccctctgttttatatttttaccatctaagggccaagtgtgctaccataaactttatgggatttttgtaaatatcagctgacaatttctggtgatctatgtgggcttttatgatcctgtgcagactaatcagagtatttagtgcccgctgtgagcataacacttagcagcagggagagggggttaaggaggtgatccttgcttaaggacccacacggtggttggagagacaggatttatagccaagaagcaatcacacaagacacaagaatgtatgtcatcaaaggggaagccaggtgctgcaggcctttagggaaggggaggtgggggtgggggcacacgagtgtccatagcagcagtagcaatcagagaagtcttctggaggaggcagagacttgaccgaggctttttcaatggagaggggttagtgagaggtcagcaagtcaacaaggtagggattcctggtcagcgaataaacaggagccaaagcagagagtcagaaatgagcacagcatgttcacagtctaatgagactgctgaccacagtttaaagtgaatggtgcgagatgataaggttgaacgctagtcagaggagtttaggttgaatgtggaaggaaggaggaagaaaacattttttggtcagggaagtgacatggtgtgttttgaacaagatggattatttgtgggaggaaaaatggagaatgggcatcttgtgcatgacctggggtgtgagatggtgaggttctggactgggccatcagcaaggttttttgaaatgcagtgcacgcaggtaatcatgtctggcatgccagctcagtgcgttcaagtgggagtgctttataaataaggtcatggagattaagaccccacaatagtgtgttagcaacataattgggttgtagcacatgtagctgatttagagctgaaatcttttgttttagcctttcctcatgtcttgttggctcagctactaagtaattgtgtgtggttttgggcgagctacttaactcctcagtgtcttggttttgttgtctgtaaaatgagttttgtttttttttttttttagagttttgctccgttgcccaagctggagtgcagtggcacaatctctgctcactgcaacctccacctcccaggttgaagtgattcttctgcctcagccacccacgtagctgggacttaaggcgcacgccaccatccccagctaatttttgtaattttagtagagatggggtttcaccatgttggccaggctggtctcaaattcatggactcaagcccgccttggccttccaaagtgctgggattataggcatgagccactgagcctggccaaaatgagggttttatagtacctcgtaggcttgttacgagaattaaatgagttagtacatataaagtgcctaccctagaacctggcacacaggaagcctttaaaagatcttattatttatttattcagtagtttgcattatcatgggaatataaatatttaaattacccaatgggccaacgcatctagagctgtgctgaatcaaggccctcaaaaaaaaaaaatgcttgctggagacatcgccaagatgagactcattcagaaactgggatggaatgtcaaaaactccaattcaaggctgagcagtggctcatgcccgtaatcccagcacgctgggaggctgaggcagaactgcttgaagccagggcttgcagcttacagtgaactatgatcacaccactgcactccaatctgggcaacatagtgagaccctgtttctaaaaataattatttaaaaaaaaaaccccaaaccctcctgcaataccataaacttgttaagatctaacgcacaaaacctggagaccgaaaccacaatttaatcatgtcacttttgagctaaaacaacttcactggctctcactgccaagaaattgaatctggtcttcttagccagccagccttcctccacagatttgggttggcctttccagcctcctcctcctctagcccagggggtctttgcctcagccacactgtgctcctgctcatttttaaacacacccaccttgcacttcagtctcccctgtgcctttgctcttacccccaaagctcattcctcatacatcatttatgccctgtaaaagtagtcacctgtttttaatagactttattttttttaagagcagttttaggtttacagaaaaattttgcagcaaggacagaattcccatatattctctcccccaacagtttctcctattaacatcttgcattagtgagctacactatatacacagttataacactggtacaccccagtgttataattgatgaaccaatattgtggtactactattaacaaaagtctatagtttgcattagggtttatgctttgtggtgtacagtccaacgggtttttgacaaacgcataatgtcctacgtccatcatggcagtatcataaagaatagcttcactgccctagaattccctgtatgccacctattcatccctctttctcccggtcagtttttaagaatcagttcaaatgccctctcttctgtgaaaacatctcagttccctcagttacaattaatctgtctgatgcttgtatagcgctttttcatacttgttatagctgctatgtttgcatggtatgaaagaagtatacacggccgggcgcgcggtggctcacggctgtaatcccagcactttgggaggccgaggcaggtgtatcacctgaggtcaggagtttgagaccagcctggccaacacggtgaaaccccgtctctactaaaaatacaaaaattacctgagggtggtggcgcgcgcctgtagtcccacctattcaggaggctgaggcaggagaatctctcttgaactcaacaggcagaggttacagtgagctgaaactgcatcactgcattccagcctggacaacagagtgagcaagactccgtctcaaaaaaaaaaaaaagtatacaaacttttcttctgtcattaggttgtccttgaggaaggaactgtgccatagatttgtcctgacatctagaccagacccttattcttaaccggtgccttatgaatgctggctgcactgaactgaacaatgagcaaatatggttcggctcagtcatccactagatacagtatttttccctctagacaggagctgctgtttgcaaatctcccccattccaaatctgagccagcaaaggtatcataaaacaaacttgctcagggaattttgtagaaaaggcctcaagaggcaaggctttagaccaggagttctgaaagtgacatgtgtacttgtgaatttcatacatgctccttggatgggctagtttctttggagggaaccgtcttctattcccttcagattttggatcagaagcagccataggagaggtggcccaggccagctttatattgttactagaccgtagggcgatttctcgcctctccagtctccaaaaacaaagcacaaaaaaggacaagagcctggttgttttcatcctcacggaccagacaccccctcaggaaggcctctggagagtcttctgtctggtccccagtctctctgcccaggtgccccccaacaattgaggatgactagtgtgttctctttgggtaaggagcaccttcccataaacacttatttttcttaattcacgctgagcttttactttattttcgctttaaagtcactgttctgaaacgttctaaaacgccgtaggaacatgcagataggaacaaaagcaaataaatcgaatcctgtgaagtaacaaagcagacgcccttctcctaacaggcagcacaaagctaaatgaaaaatatcagtcatccactagataaagtattttcccctttagacaggagctgccgtttgcaaatctcccccaccctaaatccaagccagcgaaggtatcaaaaaataaactactcccttcagctcccagactggaggcaacagtttcagcagcaccgtctatttccttgaacaacacgagcggtttgaaagaccttggctttgacttccctgtacctgcctccaaacacacgtgggggcggggtggggtggggggagatattgccccccatccccgttgccttccgcgacgccaggccaggcgcagggcaggggagaagatggggggcgccctggattcgcggttccagctgcaggcagttacctggggtagtgagtgctctctacagacccgggctaccccaacccccccgattccagaaagggccggagaaaagcagggggcgcctgccccgctccggagcagccagggagcccggccgagccttgacgaggatgagctcggagaccgcagcagctaccgcccgctagcacctgagctcccagggggcggggcctcctccaggtgtgcgcagaggaaggccggcgcggagtcggggccggcgcgggagcccgagctgtcccccagcccagaaatgcgcggggaggagcggttcatccgcaccccagcgccgcgggagacactggcgccgcctgcctcctccgggtcccggggggagagcgcaccgtgcggcgcggagggggttaaccgggcagcccgccgctggagcgcgcttaaccctttggagcccgcaggtcagccgggccaggctggggtggcggcaccccgagtcccacgcgacggccaccccgagcgcgcaagtggtgccgggcagaaccgcgcgccgggctgcagacccgccggggcgcggcgcgcgcgggccgtgggcggctcggggcgggcggagggcgggggacggcggcgggcgcgcagcgtcgccagggcgaagccggcgtgcggcgcggcgcggcgggcgcagagcgagcgggcgggcgagcgcctccgtccccggatgtgagctccggctgcccgcggtcccgagccagcggcggcgcgggcggcggcggcgggcaccgggcaccgcggcgggcgggcagacgggcgggcatggggggagcgccgagcggccccggcggccgggccggcatcaccgcggcgtctctccgctagaggaggggacaagccagttctcctttgcagcaaaaaattacatgtatatattattaagataatatatacattggattttatttttttaaaaagtttattttgctccatttttgaaaaagagagagcttgggtggcgagcggtttttttttaaaatcaattatccttattttctgttatttgtccccgtccctccccacccccctgctgaagcgagaataagggcagggaccgcggctcctacctcttggtgatccccttccccattccgcccccgccccaacgcccagcacagtgccctgcacacagtagtcgctcaataaatgttcgtggatgatgatgatgatgatgatgaaaaaaatgcagcatcaacggcagcagcaagcggaccacgcgaacggtgagcagccagagcccgggcacccgctgccaaatccgatcctgtcatggtcctccagccccctcccccttccccgcggcgctggatgggttgagggggttggagagggtgctgccagctcggtgtcgtctacacagagaggggacatgcgtgacagccactccgcgctcccctccaggccctgaatgtcagagttaattctgcatttgtggggtgggggcggccgtggagtgtgtggagcgcggtgcagccggaggggcggcgagtcggggtgattcgggttcagtgtcctcgggctcaactttccttcaacgcccccgagcgatggcaggagggccgcaagtcttcagccggagcccccttgccagcctcttctcgccttccactcctcccccgccccctcgttgactaggaagaaggtccctggtggcatccggaaaattctaggattgcccggtttcgccctccgcgccggtgggtgaagcacacccatcccctcgcgggggaggcccggcctcggtatcggggaaaggggttcgggtggagcgtgcgttcccgctcccgtcgccggctgtgcacacgtcggtaacctagcaatgcccggggagccgctgccgctgtggggctcccctccccagctctggcccgggcaccacgtgcagcttccacgccggccggggctgggtcgagggaggatggagcagctcctggccagccctcccctttggagaccgccagtgccccccaacccctgtcggctggaagcctttccgggtgagcgctcccctagggagaagcttgacatgactcgactcgtccccgctccgattgcccgccgctcgcccgctttgccctcttctcaggctttcagacccgtgcttgctttgactctttacttagcaataattggctttgcaaacgcccatctctctaccttgctgtcacctctctcacttctgcttcagtgaggagactgtggcggaaggcggcaggtgcctgggagatctgcctgggagatggcctgacccaaagctggcgggggcttcgcatagggagcctccttgagtttctgccttgtgtgcacctggataccaacctacacggagataattccctcttaggcctggaggcccctggcataatccagtcagtctatcctaggtgtaggggtgcaggctgactgccttgtctgtctctctggatgctggcttggctgatgctgctgcaatttaaaatgcaaaaaagccctaaagatgttttctgttttcggaagcctgtggaggaaatgagtcccaagcatcatgaattttcatttgcaggaagtgtcagtgcataatctagatatttgttatggggtttttggtattgcctgggtgcctatggaagattttttttcggtactgaaaaaaatgcatttgtggctgtggaaagatgttggagtaacactctgaaaatgattaagactattgaattattggtactgcctttttttttccccttggtgatggtggtagttatgttagagaaaagctgttgtatgtatctgttactcattagagatagatgggttttacaaatcagagatgcggagtaaatgtgggaatgacctcagttttgtcagaagaaatgcactaaaagaccctttgtgaagacatgatgtgaaggagtactaaccccactgggtgtgatgcagcggtgatcctgtgtgattgacactgagaccagagctcgtggacttttcttgactctccagctgactaaagcccagcttgtgaaaaatagcacatgagattcaaaatggaaacataggagtgaatgattcccctgttattgatgggagacaacctttgatttttttctcctacccactggatcctcatttaaaaaaaaaaatctttgtttttctccttctccccagaggcaaactatgcaagaggcaccagacttcctctttctggtgaaggaccaacttctcagccgaatagctccaagcaaactgtcctgtcttggcaagctgcaatcgatgctgctagacaggccaaggctgcccaaactatgagcacctctgcacccccacctgtaggatctctctcccaaagaaaacgtcagcaatacgccaagagcaaaaaacagggtaactcgtccaacagccgacctgcccgcgcccttttctgtttatcactcaataaccccatccgaagagcctgcattagtatagtggaatggaagtatcctttttttgggggaagtctttctcattttctcttttaccatctgttttttaaaaggatttgctttctgaagtgacacaaagctgtagcagtctggaatgcgagtaacagaagttgtatataaggggtttcattgtatataccttcctgtctcttcgggttgcagaggggtggctgtacgggtatatttagcccactgtctggatgtgtgtatagtagtagtagtagggggagggagtgacagcctgaaacttcacaggggcagataattaaaatgtgaaaccaacctttggttattggacattagatggttagttttaaattcagtgttgtctttgggcaatagcatgcattgaacctattgcaaacaaggtatacagattagaaaaaaagactgtataagactctgtttgaagggaatacatttttgacctttagtagaatcttctcattctgatgtttgaaatttgcttctgcaactacaattaatgctaaggttgcttctagtctgacatttggtgattctaattattcaggtagctgcagatatgagcacatgcttcctagggagagattacttttgattttttttctctgatcagtgctataacttcctggaatttccttttgacaagttccaaagaagcatttggaacgtgagcatgagggagccagtgaagggagaggctcgtgtgtgcctcttcctcctgggcccttatgagttatagaacagccttttcagtggaggaatttgcagttgctgcctttataaaaaattctgtctatgtccttggactggaggtacatttctgggtgtctcctttgtatttttaaaattgaactccaaatgccccagaatggctgtcatgtcccagatcttggaaaacgattgtgcttcagcctgcttaaccccttccctaaatctggaggccaacctccagttactgccactcttcagagaaggttgactgaggccttctttctgagcaaatggctttttaattaggcagatgattcattggtctgggtaaagtaaagcatttcctttccccagaagtgtgtttggaactgtcaggggccttagaacagttcctaactataggaaggggtgtgaatgtaggaattccctccaccaggcccagaaggatggaggggccacaccaaaaagggaggatgttggcagccagctagaaagtggagctgaaatccccttataatttgaggatctagctcggcagctatttgcatgccctctgtctttagctggctattttctgtgctaatggacaggagttaaaatgaggtaactgtctagaaagattttggagagagcagccaaatgctagggtaggatttgaggggttctcatgtgctttttcattttgcagcagatgtcccttctctagagtgagttatggtgtctctcacatagctggggttgtgtgtgtgcattttcttttgaagttctctagtctgagaacgaggagggagctcggtaagccagcatgtggcccagtggcattgctagattcatgacaatggctgtaccttgccaggaagacctcagactggcttgacacgactctgagtaagcagagacctctttgtggggtcactacttttgtgtggagtaggtgggaggcctgatgctgtttctctttgtgcacggtaatgtgtacatagcaatttttgcatgcagagtgaattcctggatcacgctgctgtctcccttttccagttgccagacacatgtgtacaggaattaggggacgtggctgccaattcagggagaagcctgtttacaaatgggacagtttgtaaaatagatagacccttaagcaatatatgatttttttttctctttttttaatgacagtttccttctaattcagggagcaggctatagaaatcctttccaccccgggcagctctgtcaaggccccatccgcagtgggagagcaagggtcaagggtcatttgtttttacagacaggcatgacagagtgtcctgccccctggaggagtgagggatgttctccttatcagaaggaattgttaggatcagacccatctatttctctattgctctgttctgcttcacttgtgaaaatcttatggcagtgagatggtatccacttgtacctggagaccaaaactggaccaacataaagaaaaaaaaatacaacttatatttagtcttcctgaacagtgttagtatttctcagatgtgctggtttatcatttaggtattgggaaattgaaaaggaagaatacctattacttaggtattgggaaattgaaaatgaagaatggaagaaagagggagggaagagactattgtgtttctatggagaacaacattggggcccttgactttagatttcagtggggacctacaaaaaggaaaaatggaaagggaattctgaagtcttaaggtgggctatctgaaagttggatccctgggtgaaaaagattttataatattagatgagttgagagaaccaatgtgaattaaagctgactggcttaaaaaaaataaacccatcaaaattagtaagggaataatgttattcattgcctttttttcgttgagttatgaaagctcttcgaagatgaaggttttatgaaactcaagatctctccagaggccgggcacagtggctcacgcctgtaattccagcactttgggaggctgaggtgagcagattgtgagtccagaagtgagcagattgcttgagtccaggagttcaagaccagcctgggcaacatggcaaaacccctgtctctactaaaaaaaaaaaaaaaaaaaaaaaaaaaaaattagccggcgtggtggcacatgactgtagttccagctacctgggagactgaggtgggaggatggctggcttgagcctgggaggcggaggttgcagcaagttgagattgcgccagtgcactccagccttggtgacagtgagaccccatctcaaaaaaaaaaaaaaaaaatgatatctctagagaggtaaagagtatttgtttcctgtggcatttttggatttcccagaagtatgtcaggatgaatggagaatagtctgttcgtatgctccagttttaagtaccttgaagtgtttagttaaaccatggccttgcctcttgtgggtgagtgtataggcgaagcactgtggtaaaatcaagcccaggaattgcagatgaggctggtgctcacaaaaccttgtatttggaaaggctgaaaacccaaagaagaaaaacaatcattttggcagatgtcaaattttgtgttgccagttttgacaatgtctcttaataacaccagaatgtttaggtaagtatctcttgaaggctgatctcaaagtgattcttccagacagaccaccaagattgagaaatgttaaagcctactttgaacgtgtctggtgctgatttcttatggctttttaatttaatttgtttacaaattgagcacagtaacagcatattataaactgagctccagtccggctctaatctgaaacagttatagccatcgattcctctagcagagaaagcagaggcgggagctgaagcctggctcgctgctgatcacatctgaggtattggaatatgccatgagaaagttataggtagaatgagaaggtcctggtggcttggcctggcccagtccagacaggcgatttaggctgaccctgccaagaatagcccctgagaaaatggctctaacacatggaggcaaggatctgcggaagacatttatcccatgatgatttctctgtgtctaccacagccgggaacttagtaaggctcttgtcacttttaaacctgtaagaagcagaaacctagttcacacagtgccctaattggatgtacttttaggttttaatatgcagtgtgcagccgaagaatgagtgtaacatgatccttgcaacagaagaaaaggacacggagaggtcatttggtaggaggctccactgtgagatgaccaccgatgattacttctgccgaaaacctagcagtcacagcagtcagccgaaataggatttgtgtatgtcattttccttttaaaagtgctttgaaagtggtgtgatcgggagtgtgatgagggacatggtttatgtttccataacacatatataccttaacacattttttcagaccatttgacatatttatattattggctatttttgccaattgtgtggccttagctatttacatcccattccctgaagatgattctaattcaacaaatcataacttggtaagtgtccttagagttcctgctggtcctggtatatggttatcatttgcttctatacttaaactggcagctggccttctgggtggttgaagtttatagctatgcatgtcgtgtttcttggagctttgcaacagtggttttttgtttgtttgtttgttttaacctgtattctcaaatttatactgactgaaagtatttaaagtcatgaatcttttataaatagatatggaatttttatggaagagatttggagcagattttaaaataactgttatctccacataagtttttgctaccattcttttcctgataatattagcttttttcttttctttttttttttttgtttttaatctagtgttcttgggagtggtgggtactttggtcagttgttctggtaagtagagaattatcgtagactttgtacatgaactatttttagagaagtagaatataacaaaactaataaatctacatagagcataatttggagaataatacatgatattattgaatacatgatataatattaaagtttctactccacgtcctatgaaatgctccaagagaaaatgattgtatggttaaataaatcaggatgcttccatatactttgctgccttcttaaagatttatagtgcacattagcttagtaaaagctttgggaagttctgcagttaaaaaacaggtttccttttatttaactcagctagtccctaaaagtaatcagtcatgaattctttaaacattttttttttttttggcaaaagactttaacatcatggaaccagtggtccatggaacttcctttgggaaaggttgatatagttttttttttaaaaaaaaagcactaaagagtactagactgggactaggatcttgtcccactcacctgtcaactagctgtatttggggtcatttctcatacctttctgcattgctgtgcagccacctggcaattaggaggattgggtaagaagattgctagtatcgtttttacctctgacattctgcaatctttctttgatgattcagaagccatttcaggatttttctggtgctgcagcatccttcttgcaaggattggttctttgcaatcagaagccatgcagaatgggagatgaaggggagcccattctggataacaggaaactctattgtttttcttctcttctcttagctggttccgtttgtttttggcttctcatgttgaagctctattttagcagggctggatgttcctaactgagcgagcgttgtaaaggcaaacacactaggctctcccttgtgtgggagagctctgctggcttctgaagatagtgaaattatgctcttgtgaataagccttaacgatttatgtacaggatttcatgttacatttaaaatgttgtggcacatttcagatgtaatgtgatgtctatttgtatgtgggctttagtagtttgatatctagagaattttctaaaaattttgggaattgatgctgaaaatacaactataaatgggagtcggataaccacataaacactggtagtatatatttggacaatgccagagatcatttgtgtaactttggacattttatgtagcttttgatttctttgtagacatgtgacattagatgattgttttaaagaaaaagcagaagtggtggaaagcctcccatcaatggagatagatcatcgtagtctaggccacagatggtgttagccttgttaccaaatttaacgacgtggatggtgacccagattgttacttttcgtagctcaagagaacatgattaaacaaacttagaaaataaatacctttcagaaaggcagattaattcagatcagtggaataattaatgtagctgcatgtgtaagccaattaatattctgaatttttcccagggaaattcagggcactgatataggcactgtcagaccatttggatttctcagctaagaagtcaggaaataaaatacaggaaatggattaatctttcccttttgcaccccttctccagtgaatcttttcttgactattcttaagctttgaacttttttttttttttgtggggggggatttggcagtgtgttaatttggtgggcctttctaaaagccaacgtatattcctttgacctcttcatatagtattctgaaactcatggcattcaactttgtgtcttgctttcacttgggtggtcacatggccagatgaatttttactctgcttgactctttaaatacttcctttcccactgtgggaagggaagatctttgtggatttccttctgactctaagcaaggtcccatgccatgttggtcctcccatgagggagctggttttttgtttttttttttttaaatacatttgacccaatttgtactagagtgattgctctatttttgggattggtttagaggcagctgaacgaaacttatttttcatctgtagtaaatacctttcatttaatgtgaatggtaaaatcaaagggcagacgctgaaatgagttgcaaggctgcatgtatctggaagctgctggttttctttgcctgatagctccatgggaaagatgcagttgagcgatagagtgagatccagggccagctttatgtatgatgtttctgcctgttaccagttacctagtaaaattatgactttttttggggaagaaacgtggccatccccattgatccaatgtgtctttgttctagatagtatgtaactcagctagttttgggatttggagactaccttggggggcagaagttttcccagggatagtttttgttctttatttttttaaaaatataaacactctcaagtttctctgcagctttcgtttatggacttgcagggctagtggaggctggagtcatggaaacggtgcaactcagttcccacagtaatagccctcctagttcagtcaatagcagtatttcctcagttccacttactgaaagcaaataccattgattttattattattttttttttagcacagaggaggggaatgcctctgtatcaagtgtcagagtggggatgattacaatatcatacttcactgtgatgaaaaatgctttatttcatatcattcagtttcttataagcaaaccgacatggttgaacagttttgagtctgtgtaatctgttcctggtactcttcctcccggtgctacctcttacttctctggagtgtggaactgcttgaaattaaaaatgtccagaatggagatcttcatctgccaagtcagaccttctttgatccctactgatggctgcactcacctctaagccatctctgaaccagcactaagcgcccggaggcaaaggcccatggcccatgtctctctatccccttatctagcaaagtgcctgatgtaccaggtgctttttatttgtttatttgtttttttttttttttttttttgaggctctgttgcccaggctggagtgctgtggtgcaatttcggctcactgcaagctccgcctctggggttcatacctctctcctgcctcagcctcctgagtagctgggactacagacgagcgccaacatgcctggctaatatttttgtatttttagtagagatggggtttcaccgtgttagccaggatggtctcaatctcctgaccttgtgatctgcccgcctcggcctcccaaagtgctggaattacaggcttgagccaccgcgcctggcctatatgcacatctttatcctctggagcgtcttcaaaatacagttaatagtgaagcattctgaatccccagccatgcctgatgcagtggtaggggtatacagtagatgttcagtaaataagtattgctgatgtgcaccaagcgaatgactttcccaggagaagcgccaccatcattccttcctctgagccatgtttcagattttcttgggtggcaggtccctttgtggatttcttgcaggtccttagctgggaatgagtgggaaggtgtacgtgttattcctgaaaagcttagggtctgcggcccttcttgtgcacctctgcttaaaagagcccacagtgttggctttcatagcagagcagtctaggaaattttgtactctggttccagggctcagagtagcaagagtgctgggacctgtctgagaagcagtgctgggctgtggatgcttgcctgtggcaccagatgccttacagtggccaggaatgctgcgggacagtctactttgattgctttctttcctccatggctgagatctgagtgtagtgttaactgggcttaaaaatcaagtccgttgtatctgcatggtcacgtagttcggcatctcatggcttttgcacctagaggtgtgaaccataatacctgaaacacaatttcataacctggctccttgggcttagcctatatggtggaggttaggtctgtatatcatcaagactgtgtctttgcatggttgtcattctgttggaattgaactttcttatttctgtaggcctaggttctgtctattcttctcagacagctcatatgctgcttcttcccttcagccttctctgatacttgtccactccccgcctgcctacatctgagtacttgctttccctctggacacccctgtgcccagtccaactctcctgtacagacaccagcccctttcccctggtttataactgttgtgggaagtggcgtggagtgtgatggtctgctcatgggctgtggggtctgacagcctgactctttggctgattagctgagtgactttggatggaactagaatatgagttcctagaggctgagactgcagtctgatttgggtgtatagccttgtgaacttaatcctgtgcctggcacacaggaagcacatcaggaaatgcacgtcaaatgagtgaataaataaatgaatgaccatacaaggactccatggtatattcttgtagatcattagttaattatcaacaattggctaatgattaatgtttgcctgagaggctgactttttgtccattagtaatgacatcccaggaaacacctggcagagttcgtctttaatttcaggagtatatctttctttcttggcaaatttaactattaaagagagaagaaagacaagtacttgatactttttgaatctgtaagttataaacctgtcttctgtattcaatgttgtatattagccacattgcagatgattctatttggatggatgtgtgactgtcacctttcacataaaaattgattgagccagtcatagtggtatgtgcctgtagtcccagctatgtgggaggctgaggcaggagtcttggttgagcccaggagtttgagactgtaggggactatgagtgagccactgcactctagcctgggtgacagagcaagactctatctcaaaaaaaaaaaaaaaaaaaaacaaaaaaatgtggtagaaggggagagagcctcaaaatgaccagagtagatggactcgtgtagtaaaactttacccaaagttggtttcctaatgatataatgtgaaacagtctatgtgctatacaaataattatatctcttttgttaagccttacgtcattttgacaaaggctttacttgattgagtattgacggcttttccaaaataaaatccagctcttaattgagatttgtggctgggcatggtagctcatgcttgtaatcccagcactttgggacacttagcagggaggattgctggaggccaggagttcaaaaccagaatgggcaacatagtgagattccatgtctccccccgccaaaaaaaaaaaaaaaattagctgggtgtggtggcgtgcacctgtggtcccagctactcaggaggctgaggtggggggattgcttgtgcctgggaggtcaagactatagtgagctgtgattatgttactgtactctagcctgggtgacagaatgagaccctgtctcaaaaataaaggaaaaaaagaagaatttaggttttttactattaaaattccataagaggaattccagtgggggtccttgctcatttggtttgtttttttacaatgtgaatatcattattttatagtcataccttatacaacgaacctccccatctagacccttcactagtgagactaccttagggtgaggatatttgggtatattagagtattagccagaactctttgggttacagattgtgggaatacaactcactcaaattggcttagctgaaaaaaaagtgcgtatgtatgtacaatttataaactcagttaaccaaagagtccactgggtagaaatggcatcagacacagctggaaaggggggggctgaaaagatgtcaccagcattctatccctgccctgcaccctcgggtttctgagccagagtctgactgacctctagtaggtcagcctcacgttgcctatgtgtacatcttcctcagctcattttgaggagggcatgtggggacgtgcatttctttctttttttcaaattttattttattttaagttccgggatacatgtgcaggatgtgcaggtttgttacataggtaaatgcatgccacggtggtttgccgcacctatcaacccatcacctaggtattaagccctgcatgcattagctatttatcctgatgctcttcctcccacatttctttttttttgtttttagcatttattttaggtttgggggtacatgtgaaggtttgttacataggtaaacacaagtcgcacaggtttgttgtacatattatttcatcacccaggtattaagcctagtacccaatagttatcttttctgttcctctctcttcccccaccaccccgcaactcaagtagacccagtgtctgttgtttccctctgtgttcgtaagttcttatcatttagctcccgcttataagtgagagcaaggcatttctttcttaatctcagcttaagttcggcattttaacaatgattgcatcagaaacagagacctctgtagcagattggtgggtagttttctttttttttaaccttcctcattggtgtttgtttactttttaactgtctgacaaatgtgaaaagtacccaatacagggtgacagcatgcccagcagtagagacacttgggtgttaaataccagtggcggtggggacacgccccaacagaccccaacagcttctcaccaaagaaagttcctaaaggaatggaagaggttctagaattctggaggtggggtgtacagggagggaccatgtgcactgttactgttgagtggacagatgtgcagaagggaggggtgtcggcgggtgtccctgccccagcaagggtagagggctggttagcagttgatccaggagtagatgttagcatccccaccatgcagctacaggatgtggtcctcaagtcctgtctgctcatgtgatggaaataaggagagtggtggaggcgggggccttccttttttaattcaggtgagattggtattctcccagctggggttcctgtgggctgtaagggtgtttggctgggcaggcaaagccggaaatgggtggtatggaggaagaaacagaatagctgaagatgggatgaaggaggaactgcctgaactgatcagtgagctccacagccccctctgtgtgtgtgtgtgtgtgtttgagagagtaagagagagctcatgctcatgagtgtgtgagttaggggaaaggtggaggtgggcattgttgacacaggccttgcaggacgaagccttcctttggtggctttaattaagcagggccccagacactgcctgggctggagaaaatgactttcttctccagaacttcaaagcaattatttttgctaattttttccttcctccctgttaggtgagtggtagttttagaaatcacaggacatctgttgaaattattgaatgagtgaacgcgaggtgaggctggagggaatcaggggctgacccgagggagggcggggaggcaggtgcagactgctcagtgagtgtggtgggatcccggtcttggctggccctgtaggagcccagccagggaaggcaggaagaggtggcctaggttagctttgcctggggattcaaaggggccaggcgagaggctcatgctctttctccttccctttccctgccatgctcatcttctgagggctgacgctgaatccttttcctgtgtccgtcagggattcctgcataacatagactcacagatacttttttacagctataagaggacgtatttataagaaaggaaattgaggcagctttattcaacaaatattgattgagacctcctgtgcagagcacagcagccctgtgtttctgccttccagcccgctgctgtggctccccatgccttgttgtgaaggaaaacctacagtgtggggttggaaaacagccagatttgttttcatattttgcattcttactataaatcatcactcaaaattgacacaagtaatacatgaatacattgtttcaaataattaaaacaatacagataaagtaacaaacccctttacctacccaactccttctaattacaatgatcagttccgtgtgtcccttccgaattgtttttcacagcgtgtgtgtacgtatgtatatatcacctgtgcattttgaaacataaatacagtttgagtattttaaatttcgtgcaagtgggaacatgcattctatggcttcctttttcccactcaatagaccttacagacctttccatatctgtatgcagaaatctaacaacttcatagttggtgtaaaatattccatgtatgaatgtaccacagtttatttgttttctttgtgatgaacatttagggtaattccaaaagttttactgtttcaaatcatgctgcattgaatatccttttgtatgcttctttgtgcatgcaagaaaacgtttgtctgggatgacaactcagaagtaaactctccgggttggagggtatgtgcgtttttaatatccatgtttattgccacatcattcttcactaagcctgtactcttttacctcacaccacatctcactgcctcagcagtcatttcactctgcagagtgacctcatgtgttctgtatcttaggctgtacaaaaggaagtcttgggggttgggtctggcctctctctgggatgttagtagcatctggagcatctggttagagtagaaagtccacaaacctgagccctagattttaggaatctattttgcaccagtgaccagataaaaggcaccaaaacttattcttgtctcccttgctttcagtcccaggtgcttagatactattgtttcttttgagtgaaatattcattccaggtagctaataggtaaataagttcctaatacaaaaactgagtcttattttggaacgtttgcttgctacggactggtttcatgacaaatactgcctttatgtccctgttagttggggaagaagaatatccaatccggtatgtctctgatgtcccgtgttcttattatctgttttattttcacacacagtaaaatctcgctattattatggtgtttagggtttgtgcccttcttatttccgaaatctctgaggtggtttagaaaatagaatttgatgaaagtgggacaatggggaatggaagcaaagtctacttgccagggtgctcgaggggaactgattgctgacacctggacatggaattggcctcaaggtttcccagcagcggcggcgaaaaagagtacatcctgacacacagggtttttatcctttcgacaaagggaagcagccacgctcattcacagcagcactttctaggaagcacatccaaggaggaatctccagcgcaggtccttgtgtaaggtacattgttggagcacaatgagccatgtcttcgccgtgcttttgtcggggtcagaaatgccgcgcaagcagatggtccctgcattcatgtttttcaggggtcagggtacgacattaaactgtggtataatgaaaatggaagtacttctcatttctataaaaacgctgctttttgattatataaattagtataggatgaaagctgggaagatgaaaaaagagtagtttaacatagccattatttaatcattcataaagtactttttaaagcatttattacgggtaaaatatagtcccattagacacattccctctttgtgctaacttggtttaactcaaaatacaaagggatacaggaatttatgcaaagaacatcctcccctgcccccgtaaaaccatatttgaatatatgtggttttattattttactctaatgtaatttaaataaatgaccaatatttttaaaaataagaaatccttgaatattcttcagtaaatagataacaacagggtataatgaaacactgtttatatttaaatgactgctttgaaacggtgtgaaagcagcttaaatgggtaaaatgctgcccttttatgtcagtaattagccccttggtcttttttcacgataatgcaaaattgtacttctctgtaggcttacacaaattctgaattattgaaatataaattaatggtgaatctttctaaagctcttttcagaatttttatctggtgggagtgaaattaaaacatccaaaattctaaattagaatgtggcaaagtagagacagccagctagaatttggtaaaagacaggtgtttaataaatcttttcctagacatccatgggttggtactagtgtggtggggtagagaaagctttggcgtgttttaggttggccaaatgaatcagttaattgatgttattaaagccaggtgggacaatagtaggttagaccgcctggttttgattgaccctgaatgaggaatcacagacatgatgaggttgggattggagaggacatcagaaacctccatatgggtctgttcctttttcagacccgccagcatgacctgccctgggttacacagtgagagacgaaccgcatggggatgtagggcagagcatctgtctcccaatctgttttcttcctacccacctcagttacaactatgactccaggttgaagttgggcatctcctatctgaccaagggacagggtctaagaacagcaggggcagtgatgacaaaagattgtctctttaaagcaagctgggcattgagtcaacttttcattatctcttcaattattttctttgtgtagtattaggtcggtgcaaacctaatgacggtttttgccataatacatcttccgaaagatagtttccatcacctctccctcccctgcttaatttcataaaatactttattgctttcttcatacataccaacctgtagaaatcatttgaccatagattgccacatttattttatggaaatagccagggcacaggccagcggatgtagtagggcaggagagaatcagcagagctggctaacaaatgcagtgggtctttcctcagtttcttgtttttgtgtggttagcttgccctgtctttctgactataactggaggcacagtggttattgcctttgttactagctgacattggctgacattgctgagctaggtgggctttctatatagggtcctgtgctgaataacagtgtttcagttcatcagccaagatcaaagtcggtggtcccataagattataatggagctaaaaaattcttgttgcctagtgacatcgtagtcattgtgcctttgtaacattgtagcacaattactttattttaaaaataaatttggtagccaggcgtgcctcacacctgtaatcctagcactttgggaggacgaggtgggcagattgcttgagttcaggagttcgagaccagctggtgaaacctcgtctctaccaaaaatacaaaaaaattagctgggcgtggtggcacacgcctgtgattgcagctactcaggaggctgaggtgggagaatcacttgagcctgggtgatggagattgcagtaagccgagattgtgccactttattccatcctaggtgactgagaccccgtctgaaaaaataaaaataagtaaattcaatgtagtctgagtgtacggtatttataaagtgtatggtagtgtaggctttcacattcactcatcactactgactcactcagagcaacttccagtcctgcaagctccattcatggtgagtgccctctacaggtgtactgtattttggcttttatacagtatttttactgtaccttttgtatatttagatacaactggtgttataattgcctatagtattcagcacagtcacatgctgtacaggtttgtggcctagcagcaacaggcgatcccatataacctaggtatgtagtaggtggtaccatctaggtctgtgtaagtacactccgtgttcacacagtgatgaaattgcctaacaatgcacttttcaggaccctgttgtttatacctgttgttaagctatgcatgactgtaatctcctctaattcccatttaatctttaccataaacccacaagggagatactgttaaaaaaatcctcattttacaggtgaggaaacaaggctagaaatggttatattgcttgcacgaggccgtgctcctggtaattggcagggccaggattcacacccggacttctgactcaagcgcccacgctcaagtactaggccatgaaagggagtccaggctcacaggctgatgatgcctaaacaccaagcggaggagggtatgaccaaagggcagagccagagaggagaccatgggggagctgacggcagaaccttttgggggcgtggggggtgggggtctctctggctaggcttcacattcatgcttttgattagtgattggaaccaaggtctggggactggcatagaaactttccaggttaggattcagtcccagctttgcctttcactggctctgtgactgggtcaagccctttctgcatctgctctttctctgtggaagaggaaataaaatggctaaaggtgttatcacaggccctggctcctagaaagcactgtgctgtgagccagaggtttaagatgggcttcagcctcacagcagtcctgtgaggtaggtgtcgttagccttagctgtagatgaagaaactgaggcttgggaagaccagccggcttgctctggggcacctggtgaagagctggctggatggaggattggatagtgatgggtccctcctgccatactagaagagcttcctggacagtttgcttggattggagtttaatttctaaagccatttttttaggtgttcttaccagactgagctagtgcatctgtcccaccgaatagcctaagactttagtggtcatagagggttttgcagcggatctggtgaagaaatgaactgaaaatgagcctgctggccataggagggcctagacctggaccataccccatcatcatttagacaataaagggtggttaattcccttggaacaccaaggacagagagggggctagtttaatggtcaggatctgattctgctgcagctagaagactgaagcctgcctctacatggtggtccggggtaaaaagttcaaagctcagcacactacccacaaggcttggtggtttctttacgtgtgactttctcagccgacttgaaatccaccaggtgtctcttgttctctgcttggcccaggtgggagcccctgattgtctcttgacttaaatgttgctcagaagaggaaataaagcaggagctaaggagcacaacgatgtcagggggattctggcccgatggtcgtgcagttcctagatttggagtcgtgaaaacaatcactaacacctgcgtggtcagggacggcctatacggcacttcatcatagggtctgatttttatcctcacagcagccttgtgaacattgctgatatttgacacaccaggcagccaaggtgtggggcagttgaatgacttgcccaagagcaaacagcaagtaagcagcagaattaggatgtggacctctcctgccctttctgccacactgtgttcctcgtgtcatggagtcctccctgcaggtcactcgggtaagagaccaaggctcacagatgggagctggcttgccagagctagggctcctcaggacccaggtgatgggcttgcttctctgacatgtggtccctgacctctgttttctcacctgtaagatggggatcatagcattattaatagtcatgttgttgagaggattaaaggcgattttgcaagggaaccctctgtgaacaacagatgctggcccattgatttccttgtgcatctagtcccactttctcaggcatttaggctctgccctgctctggctctctctctcttcagccttccaccgtatcaggagagtggagactctggaggaagacagatcttggtttggtttctaggtttgatgctgactgactgggtttgggaatgaacaaatgatctcacctcccttggtctggcttcctcatctgtaaaacagagataataattctcatctcacttttcatgtgggatctttgtgaggagtcaatacaaataatgtgcgagggagctctcatttaccagaaggcattagttaactggtcaagaatagttcaagagagtcttacctcccagtgaagtttaaggtttggcagtatctgagcactgggggaatcttttcctataccccccttgaagtgccatagggttttgagaatcagtcacacggcacacctgttaaatccctgtgttcttccatgattgctgcctttctttgccttatgattttttcccttattgtggcctagtccacggaggttggaaagaggagtgtgcccttcccttcccttccctttcctcagcaaggggctagtttctactcatagctcagggctcacccacagcatagcgctgtgtggaagcctggtgggggcactgggtgagtggtgctgcagcagaaaggcctcctgctgagacgctgaggtcagcattttcagcggcagggagccctgtgactgaaagcagaaagaccaagtacagtgtgaggactcgggttggtgtttgtggccacattgatggcttcatggaagtatgttcccctctgtgcaatgaactagtagggcctgtgtcttggggcctgcaccttttgattgcaggcaccaggcccagcattttttctgtgttgcctatctggacgacaagccatacggtagttactagcgtccccattttgcaggtgaggcagatgaagctaggaggcgttaacttaaatgactctttgctgagggaataaacccataagatgacaaatgaggtctgtggtcactttcttcactgttgcagtgctgtgcccagcactgagtgtgagggatgtcatggagagaatgctgaatttggagtccggtggcctggctttgagtccctgctctgtaactttacttcgttgtgaccctcactttcttcattggtcataaagcaggaggtaaaaatttaaatgagatctgtgtgaaagcgttttataatctacgaagctatatacacatgggcggcatcatccttatggctgtctgttgagagagggcctcgaggagaggacttggcttcatcttgccttctaatccctcactgcaaggccctgaatcctaatccctcactgcaaggccctgaatcctaattccactccatctctccatgatgccagtgccacatctgggacctacgcagaagagtcatacctgccagcacagctatggtgattgtgcttgggaagaagttgaagttgcagaaggaaggtggtagagagggactgaaagagccaaccaggccagagctcgacaggaccctccctccttccctacccttcagacaggagctgcatcaccattttcttttccttttctttctttctttttttttttttttagacagagtctcactctgtcacccaggctggagtgcagtggcagtatcttggctcactgcaacctctgcctcccaggttcaagcgattcttctgcctcagcctcctgagtagctggggctacaggcgtgcgccaccacacccagctaatttttgtatttttagtagagacggggtttcaccatattggccaggctggtctcaaactcctgaccttgtgatccacccatctcagcctcccaaagtgctgggattacaggcatgagccaccgtgcccggccatgcatcacgattttcaaaggccagcttcctgactgttccttgaactccttgagataggtatttactgtgcttgtgacatgcaaactgcaaataattcttgcctcataatggataggcctgtaacccagccagccctctaggcaagcaaatgttatttcctagttttaagtgtgagcttaatatgtgaattaatttcacatcttcatcctcttcctaaatctgtctttgttttgtctgatgaataactgaagtaatggatttggtcacaccactagctgggtagccacctgaggctggagttctgatatgtgggtcttgcctgctttctctgcactgtggctttgcacgtcgggtgctgaagctggggagctggaatcagctggtgtgttctctgtagaactgagaggactagcaccctggggtggaagcagccctgccttctgaaccacagacttgcttgtgtttgatcttatgctgttttcttactatttctgataagaatgtgaactccttgtgagcagggacccagtgtcccatttctcttaaatcctctacagctgctggcatgggatgtttggtaaataatagaccatttaatgaagcatcactctgtctgtaccaggcaccttgaagttgctttgattgctttgcctgttttcctaataggtgtccggtggtctctctttccaatgcaggaacagagtgctggaggtagagactgtgattgcttaatgaagatatcagaacttgcacaacccacacatagggctcccatcaaagcagtagttctagggctgcaacctcttcccaaagatgttgcaacacttgtcttcagagccagtttctgcttttcattttcctttgcttctggctaaaaatgggatcctgttgtcactgaccttactccccgtcttttctttaagaaactcttgagtatttgtaagaaaatcaaatctatcttcaaataaccaagttttcttatctttgagaatcttgagtgcaatgtgtcatgggctctgaaggtcttacgttgaggaatggcaatattatcagaattacgtgtccagcttcccaagcttactactttgaaggaacacatatttacacaattctgatgtgtttattaaacaaacagctttaccacttcgcagtcacgcttctctaagtctgcagtctcgtctggcctgactttctccttgtgccaagaattccttcaccttttctctttagcctttggccccaggaaaatgggaaagtaagatattttactcctggccaatgcctgatttttagaagccttcctcactccctggcaaggcacattttcctgttacctcagagtaaagagactcggttctggggttctgcatagtgatgctacatgcctgacccttgctagggtttgagggtccttgggaactgatgcaatcgtagaagtcacagctgtcattcaggttatttacagaagtagacagaattgcttcacttgccagcagggcgtcttgagcttgactcagaaggatatgtaagtttctgctttttttttcttgcctgtttcaaaaacgcatttttgataccaggaaagttagacaatttaatcttatctgtagcagagggagcttcatccttgctgtgtgaagctgtgcgagacgacaaagactgttgtagaaagaggcctcttgcttataattgaagcatctttgacctgagtcagtgttctgcagccaggatcagataatcagcactggtcactggcacctggcattgggacctggaggcaaagaataacagaattaattggtttccagtaagtagcagggatcatggcatgttcatactttttaaaagaagccttattgagattgagatataattcacacaccctatacttaactaatttaaatcatacaattcagtgttttttactatattcactgttaagcaaccatcatcaaaatcaactttagaacattttcatcacccaaagaaaccccatacctattagctgtcaccccattttccattctattccccctccctagccccagccctaggcaattgctaatctgctttctgtctgtggatttacctattctgaatatttcatataaacgggatcatacaatatgtgtcctttttgcctggcttagcataatgttttcaaggttgattcatactatcgtgtgtatcactacttcattcctttttatggtagaataatcgtccactaaagggacataccacatttatttatctcttcatcaactgatgaacatttgagtgttttcccctttttggctattatgaataatgttgctgtgaacattcatgtgcaagtattttgtgaacttaagttttcaattctcttggctatattcctgggagtggaattgctaggtcatatggtaactttcccattttgagggactgccaagctgcttgccaaagcagctgcgccattttacattaccaccagcaacatgtggaggttccaatttctgtacgtctttgctaacacttgttattgtctatctttttaattatagccatcatagtgcatatgaagtggtatctcattgtagttttgatttgcatttctctgatgactaataatagtgagcatcttttcatgtgcttattagccgtttgtatcaaatcctttgctcatttttaaattgaatttttaaaattattggtttgtggcagggcatggtggctcatgcctgtaatcccagcactttgggaggccaaggcgggtcggtcacctgaggccaggagttcgagaccagcctggccagcatggtgaaaccctgtctctactaaaaatacaaaaaatagtcagacatggtcacaggcatctgtagtcccagctacttgggaggttcaagccggagaatcgcttgaacccaggaggtggaggttgcagtgagcctagatcatgccactgcactccagcctgggcaacagagtgagactcaatctcaaaaaaaaaaaaattattggtttataagacttcttcatatattctgtataccagttcctttttggatttatgatttgcaaactcctttctttctttctttctttctttctttctttctttctttctttcttttcttttcttttcttttctttttctttcttttctttctttctcctttcctttcctcctgtcctttcctctctccctttctctttcttttccttttctttctttcttctttttttctttctttccttttttcctctctctctttccctatttctttctcttttcttcaggcttttgccctgctggccatactggagtacagtggtatcatcatagctcactgcaactttgaactcctgggctcaagcaatcctcctgcctcagcttcctgagtagctaggattacaggtgtgtgccacccaacctgtgctaatttttaaaaatttttgtagagatgggggtcctgctacgttgcccaaactggtcttgaaatcctggcctcaagcgattccctgcctcagcttcctaaagcattggtgttccaggcatgagctactcactgctggcctcttcaatttcttgatggtatccttcaagcacaaaagtttttacttttgatgacgcgtaatatacattgttagaaggccatagctggattgagtcttcaaggttgcctgttccaactcccttgtcggagtaacgggaggcactgtgatcagagaggaggggcctttctgagggtcacagacccacaaaaccaggactggagtataagtctctggactttcaccttgggacattctcagtttccaccccactgtttctgagggtcgaaaggtttgggtgtatatgtagggaaagataattggtaggctctgaagcacacagttcatttgtttttcaataaggaagagtcatgttagaaattttgtcctttcttccagaaggtacactatatagcctggagccacactgtccaaaatggtagtcactggccacatgtcattataagaacttaaactaattaaaattaaatgaaatttaagattctcagtcataaagctgtattttggctaagcattgtgacttatgcccataatcccagtattttgagaggctgaggcaggattgcttgaggccatgagttggagaacagcctggaaaacatagtgagaccccatctctaccaaaaaaaaaaaaaaaagaaattagccaggcatggtggtgtgtgcttgtagtcctagctagctacccaggaggctgaggtaggaggattgcttcagcccaggagttcaaagttgcagtgatttgtgatcatgccactgcactctagcctgagtgacagagcgagaagctgggggaaaaaaaaccacatttccattgttccttatttatatatggccaccgtattagacgacatatgggttgtttccatgattgcagccagtcctgttgggcagcactggctatacccactggcattctgtccactcctgacccagtggtgccctagacacccagctgtgatctgtcttctgtgggtccctcatctacctgctgctcaggcttcttctttatgtagttgcctctgggcttcctagcaagccccctacccagactagatggtctgtgggccctgcaggcagagacacttcttctgcatagtttttggatgtggttgccagtataaaggctagtgcctttcctcacctcagccaataggtgtgacttgcagaaatagagctgaaagatgcttgcaagaagtgtgttctttcttggagaggttagctcctaaaagtgaatgctgaatgagtggatgaattgatctactctttggactaggggaagatgttgaagaattttttatcgaaaattttattgatatgtaataattgtacatatgtatggggtacatgtgctattttgatacatgcctgtaaggtgtaatgatcatagtgggtaattagggtatccgccacctcaaacactatttctttgtgttgggaacatttcaaatcttctattttgaaatatacaataaattattaactattagtcaccctactgtgctatcaaacactagagcttatttcttccatctaactgtgtgtttgacccattaaccaacctctcttcatccccctccagcccctcttctcagcctctgataactattattctactccctgtctccatgagatcagcttttttagttcccacataagagtgagaacatgcgatatttttctttctgtgcctggcttatttcacttaccgtgatggaagttggagtactctcgagtttagttcttttggctgcattggttggtggtgttttgggtgggtacttcattttagaggcagtcagttccaagaatttgcaagatgctgagtgaagtggggcaagaggcaggagttggaacactgggtgttctgagacagtgacatgagggagatgggtgtagtcctgctgggtgccctgtgtagaggtttcctttatttcaggttcctgtaaccctgagggccatctgagccatcaatccaaggtcaacaggctatggaaaaaatctcaaaactgctctatgtaaaaggatgttttacccacatcttagtgatgggagatactgtagtttggaccaagctaggatattatagaccagaaatgagtctggggactatctcagacatgagaaaggattgaccaagaatcatagcaaattcacagtggcacaactgagactggcatccagggcctctggcgcttcgccataggcacattccaagtgccatggtgtatgtcttcatttacacaaggacaggtacttcatacacacaaacaagcaaagcaacttcttggagacattgcccaggcttagattttaatttatttaacccacgttaggcactcagtcctgccttcaggcccccctttgccactctcataattagaaggtattaagaaacctttcaattacggcaagatcaccagggttctcatttctttttcttatctccagcctatctctagaatctattttttgcagggaggactgtccttgactttaaagaaagcattcagaaacaaagagacttgttatttttgaggtcagcctcctccaccagactctgagagccttgagggcaaggacagtgttgtctcttatcactactcaaggactggtgcagagtgttcatttggtgaatatctgtaaaattctcatttttaggagaactcccttttgctgggcttctcaggtatgaggtcccttttccatatggtcctgaaactttatcaattccagtttagaagtagcgacctgaggaaatggaataattcttctgtccatggtgaggggaggatggggggaaggtgctcattttgcctttgaacttgataagagcagagaacagtcaggtttgtgctgagaatgtaagggttactttttcctgaattgggcagtgggtggatggagcccaacaggacatcctgggaaggattcccagagcagggagagggcaagcacagaattgtggaaggaattccgtgccataaacacagaatatcttatttaacagtggaacttttttgctgtcttctttagaggtggaaaacagttctttccaaagacaagcttaatgactgctgtgccaacacacaaaactacaagatacatttaagcatcagtttagcaccagaaatgcagtttacagaagatttgcatgaaaatcttaaaaacaggttgaaaatgtcctaggctcagctagtgcacttttaagttagtaggaacagggctctagggatgagatgatggagcagggatgtgacataggtcaggggtacatgtgtacctggcctttgaagcctcttttggggttcattttaattaatttcttgttcagcttttaccatgggcctaagtttctctggttggagcagagtaagttttcaggctgaatttcttggatcattgcctttgttttctttttcacatagcctgtggatgtctggccttttcagccaaggaaagaaaatggaaatggttttaaacactcactcacttgagccatgaatttcaaccatatattaattttgcttatttttggattttcaaatcttctgagaagcaatgaaatgacacaggggcaggccactagggtgctttggaggttctgcgtggcctggagcagtggggagaggctcgggagagtggaactgtgccctcccactcgtgctacccacacagcagcctcctccctcactctctccttcatgtatgtgtgtttgaggttctgcttagcactttatttggggaaaataagttttctgaaaacttattttgtaggcaatagaggagagattggtgtatgtcttatccttactcgagttggcaaggactctgggccgaatatttagggcttggctcttgctccctctacctaggtggattatgcagtgagatctcacttgcctttaactcatagttattgcttagctcttaggagcagtagaagtaaaaatcctggtatcgtaaatgagcacaatccctgtaataagtgatttctgtgtattattggtagcttgaaaaatattaagtgttacctccattttttaaatatgaaataaagggctagatcaggacatgaactcattcctgttgtcttccagagctattttactaaggaggagatgacccagtggtgaagagtaggtagcagcatgtcaaacctggtagctttgcagtaggggaggtgggcagtacagtgggaataagctagaactaataattcagtgatcatatggggccttgcaggtttttgttattttctgcttgggtgtaggttttgctttgcaaagtctgaaggtgacctatataattcccatatatttggagctctcaggatgtgccaaggatcagcccaattctctgaacgttaactgagggagtcaggagtccttcctgacctcaagaagctcacagttcagttggggatagatggccttgagcttgtgttttagagctctggtcccaggtagtgagctcaaacccagcacagactagattaagccaaagaggaatttattggctcacattgctggccagtccagggataaactggagtcagctcaggcgctcaaatgatgtcaccaggatctggtttctctctctccagcctggctccacttcctgtatgttgattccattctcaagaattctcagacacgacctccccttgtaattgcaggatggctgccaacagtttctaggcctacgcctttccaccttccagcaaaagagagtgtgagagtctttgtcccagtccttccagatggagtcttgtttcttcccattgtctcagattgggtcacgcgcacatccggaaccagttgcaaggccagggacgtgtgcagcactgctgacgtggggccaggtcatgtgcgtcacccctcgacctggggaggagccaactctaccctaagttcctgggctaagaatggaaagagagtcaagtattggttattggggaaaggtaatgatgtaggcttgaactctggcctgacccattgtcaggacagcctgaacttggggctgtattcccacctgacatagccttaagtcagaatttattccagtatgagtacagcatcttgttaccatgtggttttagctgcactgtggatttagacaccaaatcttgtcttccctgagaacattgtccttcctagaggtggggtggaaaacttatttcaggtaagcattcggaccttgaccctaaccttaatggtgattactgttcgaggtttttcaaacacatagtgaataaggacagctggtgcaatggcacgccctccaattggctacgttacacagataaacattcttaatctttctgaggttttgtatagaagagtggagaattgtaccaacttttctccccccggttgtacatcttcactttgtcaccaagcctggattcctcatctgtaaaatagtatcccctcagagttgctatgagaaataaatgaagtgatttgagtaaggcatggcacctggaacatagtacatcgtgcataagaagcagctattgttattatctcctaatttgtcaaatgagcagggcgtattgccagataagctctttaaagttttaatgttcacattctataaatctaggaaaatctttcctccactgcccacccacacttggattttgagaactgcatcttcattgagggtaacgtgttagaaagctctcaaacattatagccctcacagaatgtatagtacttcataattcaccaagtactttcgtgtccattctctcattcaatcctagaacaatctatgatgaaacaaagcaggtatcacaattcctgttttatagatcagaaaacttagggcttagagagatcaaatgacttacccaagggcatagtggctggaaggttgcagggcaaggcctattgccagaatcttctcagatatcccatgtctgttggagcattcttctactccagtgtggatttgcctttctgatggctttgactggagaactgtattgggtagttcatcaaaataagaagccttgagttcatatagtgaaaaataagatcaccttttccctttgttcattggcttgatttattaggattgtattctcaaacctttcctgctattaaaggaaatgaccttagtttgtgttgcatgaaatagcattaagtcaagtttacaacatttcaaagttatggtcagtagcattccaattagaacctaaaaagcttacctagctgaggtttaagtcgttgatcttggaaaaggtaaagacttctcagggaggttgggctgctgtgtatgacagctagaccctcagttcttggtctgttagcatgtggcccatttcttcctatccatgcccctccataaagctttgtgcgctggtagtatttacagtactggatgataattatggcattaattatttgagataaatggagtgtgcccagtagccaatagactattgttagagtattattagtatttttataggtcttttggatagcattctatttcaagacatttgaaaatgtagaccagattagtcaaaagcattgtacatgatctgtccatgagtgtaggctctcattagaacttctggaatcattctgaaatatacccagctagataatactaagtcataccaattaaaaggaaagacttgagtttgagttatagaatgttggagagaaatctagtttattacttttaatattgaagtcaaattttgatttttcttttatggttaatattacctgggtcctaagaaagattgcaaacatgttttcttaccttttttcttgtagaagctttatatgatgttagcttttgcatttaggtctgtggtccatttcaaattaatttcttttctatggtatgaggttggggttaagaggttaattccagccacctcccttgtgggtatccagttgctccagcaacatatgttgaaaatgctttcctgtcctcatttaattgctttggtacctttattgaaaatcaatggatcacataaatttggttctgtttctagggtctctgttctgttccattgacacatttgtctttatgctatctctgtactgttattattactgatgctttgttttaagtctaaacattggattatataagttcttccatttttgttctccacccctcactacaagattgtattggctattctaggtcctttgcatttctatctaaattttagaattaacttgtcaagttctataaaacagccctctggggttttgattgagatgacgtcgaatctataggtcaatttggggagaaggatagcttaagaacattgagtcttctaatcactgagtgtgatgtatctctttagatcttctctaatttttctcagcaatgttattagtatagaggtcttacatgtattttatttatccctaatttttatattatttttgattttattgcacatagaattttaaaaagaatcttctagttgtttattactagtatatggaaacatgcttgatttttgtatatgttgccttgtacatgccaccttgtcacatttacttattacttccagtagtttttgaagattctttagaattttctatgaacacaattattttgtgaataaagatagttttgtttcttccattctaatacttatttatgtatatatgtatgtatgtatttttcttgccttgtaacattggctaagaccttccatatggtatagaatagaaatggtaagagtgtagacattcttgccttcttcttgaactcagaaagtgtttattctttcatcactgagtacagtgttagttggaggttctgcataggtgtcctttattggttgaggaagtttccttctgtttctattttcctgagagtttttattatgaaaggatgttgaattttgtcaaatgtcttttctacatgtattgagataatcatatggtttttctcctttattttattgtggtaaattccattgaattttgcatgttaaaccaattttgcattcccaggacgcacctcacttggtcctgatatattatcctttttatatattgagggatttgattttctagtattttagcataggctttttacatgtatgttcttgagggatattgggtctgtacattttctttgtaatgtccctgtctggctttggtgtctgggttgtgctggactcataatgtgagaaatagtgtggtaccagttgctctgtcatgaccagcagcagaagtctagttttctttaagtgtgtagagtgatgactgttaggtaaagagttagaattattttaatgatcagccaagagtctctgctaagtaacatgaggtatctgtgaaatggcatacataactgttgtgtatgaagcagtgcatcagagaggctgggaaatactttaagtgggttgagcaactcataccattccttatgctaaaattgtacttatattttattagcaaaatttcttttatcactgagagaatgaattatctatctgattgccactcataatttatggagttatcagttaataaggttttattgtatgttaatatgagactcatttttttcctttctctcctctttgggttgtatttcttccaagtaagagcttaaattcatgggtcagctagtactgaccagcatctgttgagttattttgcataaatttggttacctggcctcagataagaatgtttttttaatctgtattggtggcattgttggttgctgatactgctgtagtttgttcttgcaagacttctgtttaaaagaagggttataaattcagtgtaactcagagcagaggtaaagtatagaatggaattagaagaaaacgaagcatcaatttcagtaaagtagaaatcgtttattaaataagcggtgggtgacagggaattgggagtaaccatcctggttcccatagtgatggtgcatccaggaaaaatacagggaaaaagggaatcattatggaagagttttgggtgtgtgttgtcatgctttaggaaacttgccaatttctacacctctgtcttcagattgtcgtgtttagacacacatcccacacaaagtgctcagcagtacttcttgtgctcgtctttatcccctggaatctagaggatggcacctctgggggagttattgtctcacatgatttagaaagacctccactattttctttccaagagtcgaaggaaggtgggtgagttggcctggcacctataagcagggacctacaacactgcttgaagcacctggtgacatctgcttgacaggcttcccctccccactgttgtcaccacttccatgggtggtgggtggtgttgcacggtgcccatggggtggtgtgcatgttctccaatgccacctgccctgcctcagtgctgcctcctgtaacagtctcatttgtttcgctggagtatccttatcgaaaaggtcttggggaccatttgcctaaaatgttccccagcatgaaatgtcccccacacttgctctgcacccgtgcacatcctccttttctttttttttttctgagacaaggtcttgctctgttgcccaggctggagtgcagtggcacaatcagtgctcactgcagccttgactcctgggctcaagcaatcctcctacctcagcctcccgagtagctgggactataagagtcccaccatgcccagctaattttaatttttttttttttttttgtagaggtgagggtctcagtatgttgcttaggctggtcttgaactcctggcctcaagcagtcctcttgcctcagcctcccactgggattataggcatgagccactgtgcccagcctcctcctcatttttgtagacatatcaagtctggcctccttcaggaagccttccctaactaactaatcaagctccccgtgtttctttcctttaggatctattttttggatgtgtatggtttaatatacccttaagaataatgcgtttggaattgtaattgagaagacaaggtttacgttagcagattatagtctaactctgatttttagaaaagtgatatagaatagagacttaaaaaaaatgacattctcacataggttttggatatttggagataggaggaaaaacatgtctttaaaccacacaatgggaagtgaagtgtttgcaacaaccagaacatttaggttataaagtgtcagagcagataatttaggctaaaagaaacaaagttaaatgatttggtgggggcttgatttctctggattgacccccctggactattggctgtttccttcacttccagactgtctggtaagatttttctacagaggtaccttcttattaatgaattcttcccatcacacccactctgtttgaatttctgaattaccttctccttttggtttctgtatctcaactttcttcttattgagtcttctctgacagtttctttgagggtattgctatcagagtcagacatgcccatgacaagattccaggctgtgtaatcttgagcaaatcaatcttgctggtctactttttttcttaaaagaacaaggaagcttgccttgcagggtggttagaatttgagacaatgtatgttgcatgcccagcaggtggcaggtagctaataacaggtgtgtgcttgctctacaccagggatcccctcggtctttggtctttgcatatcatagatactcagtaagcgctctcccaaaggattactgacttaacaggtagggtaatgtttatagccaaggggaggtgagtgtcatcaggcccaggtttgtatgcctatttctactgaattgtcgcaaagttatgtttcatcctatttaccaagttgtatttacagaagactagtcctgttataacaaagcccattgaaacaacacccaggaagtagaccacaagaagtcagtgggtatcttactctgtgtcctgcagggggatctggaaatgaataagggagagagaaaatgtggagtgcagaggatgctgcctggaggtgagactttaaccacatgattattctcagttatggagcaatggctttgttccaggcattgtctccaatagtcacaatcacaccatagggctgatgttttttctatcccactgaggtgtaaacagaggccccaagaggttgcatctggaggtgcgtgagcaaaatttggagagaagtaccaagtgggcacttcacaacaggtgaagagaatgaagagatggataaagataagtgttaagcactttttggtggtactggaactttatcatgtctcttgatttttaagaaaagtggcctattgactagaatttgagactttcattatattgttcagttggcttttgcatgtatattgcttttatgtttttgatgcgttttttcaaaaccctttaaattagttggattttatgttgttcttaagtttgatgaggtagacacttttttagctgggaggaatagagaggcagtgagtgtgttaacagaacacagcaacctcagactccagcccccgctctccttttatccagcggtgtgacgttgagcctgatgcatgacatcttggcagcagaggtgctggtgctctgtcaggctccgggacccctgactgaacatgcctagggtcatgaggaggtttttgttcctgtaacattggccacaactgcacagccagtgggtgaggatgctgagatacaaactgagaattttgcacttcgacctaggctctttgctagatcaaacttcttttgatgtcttagccatgatccctctgagatatctctctccaagttattaatatatctgtgtttcccatcatgtttccccttttgtcttggcttcaaagaagctcagagctaaatttattgcttgattatagttgctggattggccaaggtttaaaatttatgtttttaacttttttatgtgattccctccccattttcattttgatagtcttattgtttattgtatatcaccttaaatactttgagaagtagatcgggtctacgtttaaaaatcgcgtatgtgggaggagagggccattcggcaaatgggaaagagattggggtgactttggccaaaaaagtttgggatagatttttgtattctcttgtattatgttattccctatcagatggtctttgcagctcatttttctgtcttcttctgtgtggtcagaatcaggggagagtttttctttataaaaatgatttgttttcctgatagaacagtgctggtgggtaacattcagttctgaccttgtaggcagacctgggattcccagagggtgcagggaccgcagcactcactcttctttgtgacaggcctgaggcagcttccctggggtccccagcctgcctcctccacggctgctatggccgtgggcgctgagcacgtgcagctgctgcctgatgctcctggacagggaaggatagattttgggcatagttactaggtgtcactgtctccttttttcagcctggcttttacaagtagttgtaatttacttgacaaacacttatttggcatttccttcaatacgctgggtactgagatggttactgcatttttaggcatttaacggggataatagcatcatcgttaataattacaaatatgatcgatccatcatataggcaatacatttcagaagaatattattaaaaagactcatagtagtgggtgtatgcagctgtagtagaggagctgaagccactgagttaccccggggttcaagatggggagcagcattcccatctgtaggttgtgttcttgagtgggaaggcctccttggatacctctcgacagtaattccaggtacttgagctcacaaagaaagtgtctggggccctcagccctttggtgtggctcccagggacgcctgagttatttccagaagtggcgtggtgggtagagtgtgagggccggcctcgcctccccgcccctctcccctgtgtggcttttcctttctgtaattcaactgattgcttttccttccaaattgctggcttaagctttatcttatctaattttatctcctccagccttgtacgtccagagcatcattagggcctgtgcccattctgtccctcccacttctcttggtctccctccacgtcctgaggggatagaaagacggagtctgcataacctccgcatcttcctgcctgggagggcggctagggtggtgcctgcagcctctggaacctctccattctgtgtgcccctcaacctcatggacatactggcgtttcaggacctggccctgctttctctgtccccgtctctctctgcccactggtttctgtgacccacgcccttcccaccccattctgccccttttcctcacttgcttttcttaccttctgtcacattcacatgctcactatttctttttactccaagcatctgttcctctaaatcatgaactgtagttggcataattaaatatgtaatgtgtttattttaatatcaatatgtcttttcatacacatattagtaagagacttggctgtcagcgccgggccagatcaccatttgcagatgtccactcacgccagctcccccacggaacgtttcttatgcacctcatcagttctctttctccttgtctctctttctgtctctgtgtctctttgttctgtgtacatctctctgtatgtccctggcttcctctctaacacaaattgctccaataggccggcaccttttcctctccgtaaaccccagtttgtaggtacacacaggcacccaggcaagggtagagaaaccaaagagcgcttgttcacacttgctcacacaaggaccagcagagacctagagctgcatgccacgtctttattatccttgctgctagctcctctggtacagcagcactgtgacagtttggaatttgagcctgggcactctcccctgagtgcatcggtgacgtaaaggcaggcaggcaggagcaatcacagcctcccgtcgcctgtgtgtcccaagtgagccccctccccaaagggatgtagggaagccagtccatctgcaaggtatctggagtggagtgacaggaagcagaggatccagtattattggaatagattacatggtatgtgcttgtcacttccgtttaaaggtaaatacaaatctgtctttggcttagaattctagcctcctgacctggggggtgaatattgactggcaggctttacctcccatgtagaaaagagttgcgtgccagggttataaattagagctctgcattggatggatcttcttaatgttttctgtggagtggaattagaacatgttgtttcttttgaggttgcaaaaagcaaacaaggatccctttcctcccagactagtgggaagtagactaattacttgaaatcctgttttatcagccataaaactgagatgaaagctggggcagttatgaagatcctgatatatcctagaccacaaatttctattccttttctggaagagaaaaactgcattttaggtttagataatttggtcaaattttttaggctatcaaatgcaaagattaagtttctagagtcttgaattttagcacagagatagcatcacttaaccttcccgagtgaaaattcctgccttctaggtggtggggaagatcaaacgagctgtggatgccagcatacttaatatgtgttcagtagatattagtgacagattcagtggatatgacggctgaaggcctgggtggctcttctgggcttgttggttggtttcattataatgtatatggttggacctaagataacccatgtttgtgcttctgtggacactggtgctttcagggtcttaactatattgttttcatggaaactttgaaaggactcatggctccaaaaggggctgaaaagttttgaatttccttttttctttctttgcaaaagattttacagcttaagtcatgtaattaataacaggggaggttaagagtcaaagatttttctcttaccctggtcattttcgaagctgcacttggcatgggttgaagcaaatttgtgtcttcttgaccatttacttttttttttaactgagaaaatagattctatctctaatgaagtaattgtaaacagccttgttaacatatggtactgattttttcacagaagcattgttgaaatgcatgggaactaccaggttaaaagacataaaaatagacaatctatatagtccagatggtatctccaaactaggggatccaagtggcatgagaaactgtctagagcaggagtggcaaacacggcccccgggccaacacggccttatgcctctttttgtatggcctgtgaactaagaatggtgttttacattttttaatgtttgaacaaatagctgaagaatagtaatatcttgtgacatataaaaatggtacaaaattcacatttcagttaccataagtaaagttttattggaacacagccccactcatccatttacgtattatctatgggtattttcctgctacaatggcagaaatgagtagttgcctaagatatttgctgtctggtcctttacagaaaaagtttgccaatctttggtctagatggtgaggaattttagttctcctatgtgttaactgatacatgatttcgttttgaagttcagcttttaactttcggttatttttctttctacttttattttttactaataaagacagaagaaaaccatggctggttagtctcactgctcagactatgccttctaatgtttttgataataaaagttaaaatgcacatgctaattttatttcaaacagtataagaaagcaaaatctctctcctacattgtcctttattccaattcctttacccagtgttaacatttaatagttaacattccaaaaaatgttttgtttatactagaatatatattcttttcaaaagcttttcttaagcttagtttactagtaaaaatactcttaaccttttactatgaaaaaaattcaaatatgtacagcacaagacagaaaagtgtaatgaaccctgtgtacccatcattcagctttcataactcttcgtcttatagccaatcttatttaatttgtggaatccatttcctgtattattttgaagcaaatctcaggtatatcatttttttctcaggtatatcagcaaatctcaggtatatcattttatctgtagatatttcagtatgtatctctaaaatataataacttttaaaaaacataaccacagtctgctaacacatgagaaaaaaataataattccttagtgtatatttgagcactgagtattacctataattgtctccccacacccacagttgtcttttaaatgtcatagtttattttactctctttgaattaggatacaggtaggtttcacacagtgtgacttggttgttgtcctttaagtctattttaatctgtctgttccctctgtacacactcttttatcctccttgctacttattttttaaagaaatgaggttacttgttagaggttttacatccccatagtattgtttaatatgttcctctctcctctgaatttcctgtgaatttggtagttggacctacaggctcataacattcaagttttgttttattttattactattttttagctaggctacttcactggtgacattgagtccttccaagaggaggcacttagtatctgattgtccttttttgtgatgttagtactcattgatgtttaatgtgtagatcaagtcattccttatgggttgtaaaatgctggatactcttagttctatgatttctgtgacatttattggcttaaatgtttgatttttctccatatttaccagtttttgaagttttttttttttttttttttttttttgacagagtctcgttctatctcccaggctggagtgcagtggggtgatcttggctcactgcaacctctgcctccacagttcaagcgtttctcgtgccttagcttactgagtacctgggactacaggcgcacgccaccatgcgtgccatgtctggctaatttttgtatttttaatagagatggggtttcactgtgttgcccaggctggtctcaaactcctcacctcaagtgatccgtccccatcggcctcccaaagtgctgggattacaggcgtgagccacagcgcctggcctgtttttgaagttttgacttaacttattagtaccctttaacagtgactggtttgttttttggtttttgtaatttttaaaagtatgatatattttagcatatttactgtgttctgctgaagttactgaccctcagatcatcccccttgtggtagtgtgaaccttctcacattggtccctgtgtctgtttggcatgacctagtagtctctgatagctttctctctttctggtacaacaagatgttttggattcatcttacacatttcttgccctggatctggaatcagccattttcttcaaggagtcagtcctgctgctttttagtgggagatagtatttcagaactaaattttgggttcagaggtacatatccataaacaaacagctttttatagtaaaaacacatacagaaaatgcatacagtacaacaccaatgtagcctcaaaaaagaacacagcagagcaccgcaggggatccctttctgaacacagtcttctcccacttccctcagtcaccactcagtgtttatggtaatgacttcctcgattttctttcctgtttgatcatttaagacaaaatacgtccctaagcagtatcacttggttttgtctgttttgaattttatttaaatggatcatgcttcctgaatttttttttttgttgttgttgttcgagacagagtcctgctctgtcgcccaggctggagtgcagtggcgtgatttcagctcactgcaacctccgcctcccgggttcaagcacttcttctgcctcagcctccctagtagctgggattacagatgcccaacaccatgcctgactaatttttgtatttttagtagagacaggttttcaccatgttagccaggctggccttgaactcctgacctcgtgatctgcccgcctccgcctcccaaagtgctgggattaccagcatgagccaccgtgccaagcctcctggattcttttatatcttgcttctttcattcaacatgagattcatttgttttcattttctttgcaatatgatactccattggatgagtagaccacaatctatccattctgctattgatgtacagtcaagttgtttctagttttgtgctgttaaagaattgctgctaaccttgtatctgtctctggttgcacatgtgcatatgtttttgaagggtatatacatagaagtcgaattgctgggttagatgctatgcatgtcttctttccaatgtgtcatgccagctgatatgctcaccaacagcgtgtgagcattcctgttgcttcacattcttgcccacacctggaattgtcagactttaacatttctgttagtttgttgatggaaagtgatatctgactgtgactttggtttggtgtttctctgattaccagtgaggttaaacacttctccatatgtttgagtattggacttttctcctttatgacatttctattcaagttgtttcagtaagtctttggttcattttcccattgagttatcttttattgattcataggcatttttatatgtattgggtacaggttttgattggttgggtgtgttgcgaatttcttcttccactctggcttatcttcactttctttatggtgtcttttgatgaacacattcttttttttttttttaaacacaaatgctatttatttgtttgtttgtttatttatttttgagacggagtctcactctgtcacccaggctagagtgcagtggcatgatctgagctcactgtaacctctacctcccaggttcaagcgattctcctgcctcagcctcctgagtagtggggattacagacatgtgccaccatgcccggctaatttttttttttttttctaatggtagagacagggtttcaccatgttggccagcctggtctcgaactcctgacctcaagcaatctgcccaccttggcctcccaaagtgctgggattacaggcgtgagccaccacgcctggccacaagtacttttaaaattttattgtaggacgtcttcctccactttgttgggatatgtggtatatagtaaagatttcaaatatagtaattattattatatactatttagtattatatgcaacttatatatgatcttttaaaaaaagtcttatatctttgcctttctatttaaatttcctttaaaaaaaattgacaccaaagaaataatagtgtcacattgtttgcaccttactttttcacatacaattttattctggagctctttctacattatccatatgccagtcggcttcattctttgtcatggtggcatgatatatgtatatatttttttgagatggagttttgcttttgtcacccatgctggagtgcaatggcgtgatctcggctcactgctacctccgcctcctgggttcaagcgattctctggcctcagcctcccaagtatttgggattacaagtgcacaccaccatgcctggctaatttgtgtatttttagtagagacagggtttcaccatgttggcccggctggtcttgaattcctgaccttagctgatccatttgcctcggcctcccaaagtgctgagattgcaggcgtgagccactgtgcgcggccggcatggtatttcattgacagaattaaggttgtttttcttgtttaaaattgtgctgcaaaaaactctggtacataatcttgacataattttgcgagtacatctataaagcaaattctaaacatgggaacttctgggtcaaacaatttgattgttttaaatattaatagacaatatttactcccagttaattcatgtaaaatagcagttcatacagcctaaattaggaggtctaactggccatattcagagaaattatctggatatgaagtaattttttgttaggtctaacctgtattaatgacaatatgattacagtattttcaaaagattgacacttagccattctccatgtttcaaaggaataaatgctaatttagccaaataatagtttggagcaaattttgtgggagagcctgcgcttgtgtggagcaaatcccctgtcgtgttgtgaaatgggcgcggagaagcctgttctagtgactgtcgatgctctttgtgacagctaacgtgagggctctccggctcctgagtcatcctcctccccaaatgggggactgaccagtcttttggatctctgattttgttaaagcggaaatgtttttctctcccattccagtaattctttgagtatatctgtttttcttcagatgtttcgtgagcacctgtgttctggggaatagtgaacaccgtgaggaaggtggagtgttgactatgccatccactgtttgtcttcaagcagattactgtcgcgtaggggagttgtgatgtagtgtatttgtataacggtcttttaccataagtgggtattactccctccaggacatcatttaagtcaaggcagctgagacaatcacaaaagaccacgtattttatgattccattaatatgaacatcccaaatagggaactctatagaggcagaaagtaagatcagtgattgtttcaggcaggagagagtggggtgatagggaggtgatagctaaaagatacagggtttctttttgaggtaatcaaaatgttctaagattgaccatggtgctggttgcatatatctgtgaatatattaaaagccattaaattgtgtacttaaatgaattgcatggtatgtgaattatgtttcaatgaagctattaaaaaacattaaaaacaagcaaaaaatgcaggttttttttttttctcagttgtctcagtgaagttttccctgtaggtttcatagttactttaattgaatggatggtaaagagttgtctggtctgggctagatgcagtggctcgtgcctgtaatcccagcactttgacaggccaaggaaggtggattgcttgagcccaggagtttgtgaccagcctgggcaacatatggagactttgtctctacaaaaataaaataattagcagagcatggtggtggtgtggctgtagcactagctactcaagaggctgaggtgggatgatcacttgagcccaggagttcaaggctgcagtgaggtttgactgtgccactacattccagcctgggcaacagagcaagaccctgttgcttaaataaataaataaataaataaacaaataaatattcaagaattctcaggtctggatgtagggttagatgccagttagatataagtgaaatagccggtttacttaccaatagacaggaaagtagtcttttgtgattcccttctccactaaatacaaatcagtgctactcaggggctctttaaagaaggagttggccaggtgtggtgactcacgcctgtaatcttagcactttgggaggttgaggcgggtggatcacctgaggtcaggagttcgagaccattcctgaccaacatggagaaaccctgtctctaaaaatacaaaatcagctgggcgtggtggcgcatgcctgtaatcccagctacttgggaggctgaggcaggagaatcgcttgaacccgggaggcggaggttgtagtgagccgagattgtgccattgcactccagcctgggcaacaagagcgaaactccgactacatgtaccctaaaacttaaagtataataataataaaattaaaaaaaaaaaaaagaacagcagcagtaaaaaataaataaagaaagaaataaataaataaatgaagaagtcaatcggtaccataagaaaggacaaaaaccaaaacaaacccaaagcaaaaccaaaaactccccacaaaccagcctcccctaacccttttaactcaaagcttcgtaatgtctctgaatttataattacgattttaaagagcactgtttctcatgccccatcccccaacccatttcgggagtaaaccttttctgtcagggtgaggagaaagtgggtaaaggacttcagcatttacagttgagttagtatttgttgttctccaaatgtgcaggattcagggccctctctttggtaggtgtgtgggaatctattggtatttattgggttcttaatgcctgcctgtccttgtgtaagacactctggcagtacccaggaatacatcaaccagctgagacaaacatgaagaataattattgtcctaataatagctaacatttattgattgcttactatgtgctaagcctctaaattttaaagttgttgtaaaagcaggaacaaagcctgtgacatgtaccattgtcttatttagctctcagaatcacagtggtagaggcactctcattattttacaggtgaggaaactgagattcagagggcttagatatctcgtccagggtcacatggctggtaaatggtagattcatacccagatcagcctaacagatctgaactttttcttgttgggggagaggggcaatggaatttttaacattttcattgcacaaataatgcaaattaggcaagaaaagcacaaagaagaaaataagaatcatccatatttctacacacagatttgctcatctttaatgtttctgtgtgtttccttcgtttgtgtttttatgccttctgatttatttttatatccagtcaatctctgtcagcccatcagtgaaggccattgctaattcattaaagaccttgggactgaggacatacaaatcataatcaggatatttcatggactggggattgtgggtgggggaaggatgcagatctgacaaattcatgctgtggtctaactcagagagggtcatcttgtcccaaagtgtcccctcagtctttctctccttccccaattaagactgtcttgtgaaataattaaaaatatctataaaggggcaaattttgcagcacatataattatagaaattatatagtacaatatggacaaatgcagggctaacagtaattcttagggctttcacagatgggcaaggttgggggtagggaccggctggaggcaaagagaaggcttcctgagacagaggggactggggctggctcccacccagatgaaaacctgcaaatctcagggagaaagcttcatgcactatgaaaaggtcacaagaacctccagtcctgggatgatgcaggcaagggaaaaatcaaatgggactttccccattgagtcatcaatcatttgcctggtgattggtgggagtcacctgtgtgttgtgcctgttcccagtgggaggttagagcttcatctctgaattaatatcaaaagaagagctgtctttacaaatcaatatgcttctcacaaggggatggcatatttagatgcagaggttggcatggcgaatcggatggtttgagggtagtggggcatctgggttaaaggccctgatgttctacagacttgggtttgaatcttagctgtgctactctcaagcgctgtcacctggcaagttgcttcgtccctcattcgaggaagtggggccactggagcgtctacctcataggcttacaggtggttgggaggattaaatgagatgagcacatgcagcatttagtacagtgcctggcatagaataagtgctccatagggattagctaatgttttataattctaaaggggaggaaagatggatattaaggttggagaactatggatccttcccattgtattcacaaagaaaaccatgccatgaggcttttttggcaagtcactttaactttttgggcctaggttttcttaacagtgagatgctgggtggttctaaatgatctttcaaattctgcccatgactataatcctatgattctgcagttttaaagagcatcttaatgaatacaaagtacttgccagaatattttcttttttgattctccccacaacagtaatgggccgatgatgattcctgccattttcccagaccaggcagcagagctggcagacatttaatgactctccctcacaaggccatggagctcgtgagagagcataaggccaggttccctttacacacatgtggtgtgtaaaacggatgtacctcgattgggcttttgcccttgtcatggaactgagcccgaaggaggttcttagaggagcggggtgaggatttcaggagaggtgattcccaggggagcttcaggccaggactgtcatagtagagcagtaatttatgggcttctgacagcttgaaaaggtcatggtgttcttctttacttataaatgaaaacaaagtaatttgggggtcagggaaagacgaaagggcttgtgcagactgacctcaaaatccctggtggttatcatgtaaaaattcgatttgtttgatgcaattagccaaacctggacactttcttctccttctcaaagcaattgggattcagggcacaggataaaacagagttggggcagggggcagggaggaggcgctctggcaacagtgggaagtccagattgtttctattgtgcgtgctgatgtaattctttttctgcaagccctctgtggtttatcactttgccttcatgcacccttcttataaagcaattacagaatcacgggaaaataggcagtagcagtgtgaatcagtgccttttggaatggagaactgatacaaactgggcttcagtttgcagagggttgaggaatgtctaaggctcgtggatgggggaaggagaagtgacaagggatcacagatattgtatattgggcctctttggccaggccctccagtccccgaggcccttctatgctgcttactggctgcatgagggctgtggctgtggccgtcgccgtgtcagctgagcttgtaatttagatgttaccactgctcaactatgaaaagtcaggatcagcagctttgtcctagtgctgggagggaggtgtgggccctgggggaaccggcagctggatttagagtgtgaccgattccaggaacccaacagagctgcactagggccctcctcacctctgtgggtctgaatttggggtaggggttccccaaaccaaactgtccagacttttctgtattgacattgagtctatagtcattagtgatcagggttccgattaatctgtgtccttattttagagtagcttttggcttagggttctggtgaccaactggtcacaaccataatttagcttctgaaaggccataagagtcagaatttgtctaacaggaatctccacagagatcctgctgcatttataattgggcatttcctctgcatttacttttgccccttgtctcctactccaagccacccccatgtgcttgaatgttgaaagttttgggttgccaggctcaacttaccagcatggttccatttctgtgattattactaactgcattgcatcatacacagagcaagtggttggaaaatagacctgcgtcctagcagtgggcaagagactcgactctcctgaatctcagtgtttttacttttaccatgggagttgtaaaatatccagcccagtataacattggctggatgtaaaacagcctagtatacaacatgggctttgtaaagtgaggtgctgttggaaagttgtttgtagtaaattgtattattacatactatacttatatagtaccaaacattggcccaaagagttttattttgttacttctttttgatctcatcaaccatgccatgcaaaaaaagaggcattttagaaaagagggaaatggaggctcatgtatgttgagtgacgtgtccaggattatttgctgaataaatgtcaaaatcagcagtacaactaggtgtctggaatcttagtccagtgcacctgtcattgtgtgctgggtgcaaggcattaaggctcactggttgtggtcctaagtgctcccctgcctttgcctgcttgccccccattcatttgttcattggctattatgagagcagctgtaagccaggccctgtgttaggaatgctgctaacgagggcaacagggctcttgctctcttggagcctattgtctagtaggggagacagacttaaaaaaatattatggcgtcaattgattctctttattttctgcatcctgtgaatgcacaagggcccagagtggagagagacttggtcccctcatcttgggctttgtcttactttctctttccttctagaaagttgtgagtcagttctttagatgggtgcgtcagggttctgccttcctgtatttgaggctttgtgtacttggtagttggagatgatggacgttgcatttgtgtgggctgaagagaattaaggaagaaacgaggcagggaagtttctccgaggaggcacattttgaacccgctgttaacgattatggcagtggccctttggaggcagctgcctctcttgctgactgtcatgacccaaccatggcaattttcactgagactgcaccttctgtttgtgatgttttagttcaggtttacattatctgagtagaactgggaatgacaaggctatgaggtcctgcctatgcccctctaacatcgtttccccaccagaagttttctcctgaggatgtattaaatgccgactacttccttggaattgctggatagcctttccagcgtgagcaatggggacagctccagaagagtggcacatcaggccagggaggattatcccagattttacagctgggtaggtggaaggcaggtctggcttgtccccacttccatcaaggagtagaggtgatttgcaaatttctctgtggtttggtttacttctttctcttggtcctttgattctttccgccttcgtctttcctttttctttctctttgcacctttctcccctgaaagatcacttggcagaatggttagaaagtactacctttgtggcttagttgatggtgcacaaaataactgaagaagaaaacataccttggctttgcagattgtatccttctggagagctgaattttccagagtgctaaagctgaattgtatccattgtaagcaacaaagcttttttttttttttttttttttaaattatctttaaagaatccattttaaaaggaaattctctgaaaatacattacacatttaactaccttcagaagcagccggctgagaacttaacccgacattctctccatcatgccgggtcactgttaggaacatccaagattctgctgtgctcgagtgatggtgccttcaggttgcttgcccctgcaggtggtggctccagagtcttagacttctctggttcttctttcttttcctgtcccatctggatcccccaaaccctgacccctcagactgttaggtattatttctgcttgtattatctctccctttctgatttgtgtgttaagaaacaagacagcaatttatttagaaatataagaacagcatctgccatgtagtggttcttattgtagatactgcaatagtttgcataaacgttcccatttaacgtccacacagatctgtgaggtgagcagcattgtgatccttattttacagaggcagacgctgagtggtagagaagatgaccacatattctccttgcctggaatacaggaaatgaattcaacattcattcattggggacttctattgtacttgttagatatcattagttaaaaataattgatgttgggggtgttgagcagtaacagaagagttaaaaaatagaatattctcatagtctggttatgtacagggcttcacaaatctttgtgttgttttacagcacttagcgggccttaagaatgagagaaacagtctgcaaattaaatcacaatgcagatgccatcttctcactgctactgtggggtttagctctacagatcagaggatggctgagtatagtaggcattttctttttgtcacgtactgatgtcacaatactttgtgttcttttatgtggtctaattgcttcaaacttgaatgtgctttcatttaaatccatttatgttgcttttgtcaaatgggaatgatttccatatgaatttgaatttacatactcataggcccttgagaccgtgtggatatagtgaacccaactcttggtagacttgggctctatttttgcctcagccactgacttgttgacttgctgaagggccttgaacagaaatgattacttttctggacttaacactcctcagctgtaaaatgaggtaggaaatctgatgtgatttctagttggggacattctagaagattccatattgtatctcaaatgactgttcagagacacagtctttaggtgctcactctagagaggactgtgataagcataaagcataataatgtaaaccctaacttacaagtttctttaaaagttgactcttaagggtattacacttgctcatattttaaatatttaaaaacaattaaaatttttttccttcatattcaccattggcttttcaagcatgcacagaagtggtgtgcagatcgtttcagatcaatttatcataaaatctaagttgataggtgttctcttaatgatgttcttatactgcctgttcaccttgaccctttagctttgagtagattagagagtgtaggggaaagatctttttcccttcaaatactcaaaggatcatgtgttctcttgagcagttctgcaaatccatataggacaacaggagaataaggatttaaagtgaaagatttcagtcggctgctgagctgctgggaggaagagatggtgtgtggtgctgacctgtccctgattgcccctcatagaaagcgaattggctctccccacgttggctcccatggaaaggactgatgggagagagagtgaggagagctggggatgcccttccagaatgctgaccagggcacgtgggagcagtggtgctggctggccttcaagatccctttctgcacatgggagctgaaccagtgagatacagcacctggatcaggcagcgcagaggagcagtgtggttctcctctgtggtgtgaaattaccctggaaccaccaagcagggttcaacagcactgatccctcccatcaacccaggtctaggtctcactccctcagcaccatctcgcagcttctagcacccctggaggctctgtgaacctctcaccctgcattccttgactcttcatgaactgtcggccttcctgtgtaagtgggtcaggcaccatgtgacctgctcactgccagtttcttctttgaatagatgtttatttcatggatcattttgaagattctccgtgggtgtgcaacatggttttagaatgttgggtaatttctcatgtgttctttgagatggatggcttctcagtcgtctttgcagtcagccactgtagacttgagtttctctcttgctgtcttcattttattgctccatatctgaggaaaaccatgtgaaaaatccctagacacataggagccctgagaagtggtggcagggaatgcttgggggacaaaacagattttagagttacgggtattttaattaaaaaaagagagacccagaattgtttttcacttaaatgagcaattatatctttaacttggggatggaaatatgttgtgaaatttgtttagtcagctccctctgaaataaataaaattacagtgatgatatcattcttgtttaaaatgtttgaaaaggtatcaagacaaagtgattaaggcctaactgtttgccaaattttctttaaagctccatttttggggtatttctatgccaaaaaacatcttaaactgatgaacatatagttctccgcacttgtattggctggtttttaattagatgactgttttaatagtggaagaaatacatttaggttgggcctaagccccagggtgccagatttcaatcccagaaaaaaatgttctctctgtttagtgctaatgtgcacttaaatagcacaggtgtgagtgcttttccctggccacggtcacacatgactttcccaagggctgattggttatggggttggcaggtttaaggtcaggttccccggcttgccctccacccagaggagccaggactctcaggctccctgtaagggaagaagttacccagatcatgagcctgttttgtctgggtcagactgacttgagccacagggagtgggtacagaagcctgggttgctgccgggtatgacccgaccttcgtcttgtacccactgtctccttccttttgtgagtcaccagctcacacatctacatgcctgtaaatgaactatgaggtatcgagtatgtgctacctaccgtggtggatgctgggaaggatgaaccatgcattttcctaaacccacacttcgaggtttacaaagataaaatctcatggctctttgccatccccttctcaagaaccttcactggctctctttttagttaggaaagaaggtccaaagcaaaagaaaggaaacacagggtgtgaaggctggactcctacctaacacacctgtccattccaaacaaactggccgtgcctcctcctcgatctcccacttgtgtgggtggctgtgtcatttctgtgcagcagctgatggtgaggtctttcacttggctccatggtgaatggggaaattctcccaggcactcttcctgcctcatctgtgaccgtttgtcttcccctggggctatagtttgagtactaggtggtattttcagtcttgtctttgccctgaggatgcagaagtactctatggctatcccactcctgacctatgcccaggccccctcttccctctgggggtggatcccacttgtacgggcaactcagtgcagtaccctggaaaatggcagacctggggtatctctggtctctgccactgtctcccagtgtgtgtggaggggctgtatgcttgaggcattattttactgtggcttacctccttggtgttttctccaacttggagcttgggtgagaatgctcagggcttggttgacacctcttcattgtcccagaggtgtaagggctgggtcggaagctatgccaccagaagccatgctgccctttccaccagatacttctgtttctcttctcgacatagaccaattccctttctttctttttctttttttgagacagagtctcgctctgttgcccaggctggactgcaattgcacaatctcagctcactgcaacctctgccttccaggttcaggcaattctcctgcctcaacctcccaagtagctgggattaaagacatgcaccaccatgcctggctaatctttgtaattttagtagagacagggttttaccatgatggccaggctggtctcaaactcctgacctcaagtgatctgcccgcctcggcctcccaaagtgctggggttacaggacatttccctttcttgtttgatttctcctggtatcttctttctttctctttggactttctttcctatctcatatttattttgcttggcattgtagtagaaagataacatgttaccactttaccctccagtctgaacttggaactgctgccatacactaaaaggatttactattcttaaggatttccttccatcctaaactacaaactttttcaggtcaggaactacattttattttgtgtattcccactgtaccttcacctgctgagtgcttaataaacccaggacagaattgaaggcaggctgagcctgtataggagagcagttgctttcaagttatgttaaaaactcctgggcgggagcattcaaaaattactcatagataacaaatccagctacctgcacgtgcatgaaagcagggaactagagccactttcagacagtgacttcagcttaggaaacaaaaggttactttaaagtaatgctgttttacttatgtttaaccaattctagttgacacacttattcagaatggccttactgccaattagtggagcatgttagtgaagtttgtaataaagtcctaatttccgtgactaatgaagctttacttgtgttcaacacaatccctgctctcagttatgaagttataaaaaaatgtgtttatgctgttgctgccgctgcccgtctgtctgcctccctgcctgcctgcacagtctttaagagcactgttgctctcctcctgttcctcacgcatttcaagcacaaatccctaccattcatcaaaggcatttgctggtggtggcaggggaaatgtcacagcactgctgccactactgccaggtatctttttaaaatgtaatgtgtgtgtatgggtatgtgtgtgtgtatgacttccaccatttctacgggaatgttttttgattagaaaaagaaatagttgttacatttgcaatttgtaaccagaaccattttctttccaatgcagttgtaacagtgtaatgataagtagggtctttatccaaccctatgacaagtcacatgtacacacgccagacataggctccagattctgtaatatttagccctatacagtcaacagatttgattccctggcagtcagtctttgcattggaagagagagtaaaaattaggactggtgagttcaaaggttcttctaaggcctaagcctttgcagtaggagctttccatactagatatgttacctagagacttgtgttaaagtggaaaatcatgggctgggcatggtggctcacacctgtaatctcagcactttgggaggccaaggcgggcagatcatgaggtcaggagatggagaccatcctggctaacacagtgaaaccctgtctctactaaaaatacaaaaaattagctgggcgtggtggtgggtgcctatagtcccagctacttgggaggctgagggaggagaatggcgtgaacccgggaggcggagcttgcagtgagccaagatggcaccattgcactccagcctgggcaacagagtgagactctgtctcaaaaaaaaaaaaaaggtggaaaattatcatacaaatcatatttgtgtcaatctttgtgagggtgtcctaaactgtaagtgtgcctatatgtgtgttttaaaaccagaatgtctagtattgtaccacagaaaaaagacgttacaaaaatagaaattgtgtcagtaatttgcttttactgctatgaacaatcatatgcaattcctacaagtcatgctgtgtctagcctcacagccccctcactctccaggcctttctgccaaactcagcttctctgtgagcatgccctgatgagttcaaggggctcccttcttcgtgccaccacctttgagtccacaacaggatggctgttgaattgaacatgcacttagatttcgttaccgtttcctaggtctttttcaaatacattccgcttctctctttagttactttttagtctccctcaagggtagggattagattcttctttgttccctctcccatagcacagtttatgtggcttttgctgcgtgaggttaaagcacattggtggcttacatcttatccatttgtaaccacccagggaccagcacatggccttgtacccagtaaacaatcaatattttgttgattaatgatgcctaaagctggttaagttcttggactcaacattcttctgagctcaatgactatttgcattctagtcataaacaggaaaaggttctgttggcagccagggagatagtaaatacccctgactctcatacattgacttaatcagaaacaacaacttccccttttcaaatttgcattgtgaatgataatatcattttcaaatatgtaggattatgacattttaaagagaatataatgaaatagaatgaaggtgaaaacttgtaattatattagagcaaaactatgtttcccatagcttatatcctactatttctatgtagtgtatctggcgtggtcccatgaggatgccataaccaaatgattgaactagaaactgagaaagacttatcaaacatttagtgtcacgggcttgtgagatgaatcaatgctgggatttccagctatgttttttatggccctgtattttacaaagctgtggaaaatattgagcatttgaacaaggctctcagtcacagtcgtataacaagatgcaggatagggctttgcccgtggagttcagtgtgaaagtggctgtggttggtggaccttctgccctttcccctattgctctctggctgctttttctggtgggtgggtgtgtgtgtgtgtgtgtgttttttttttttttttttttttttctgaggtacttcccagggaacagagaaataagttgacaaaaggcacatataaaagagagatctaggactttctaaacctgaggcccacagccctttcatttaatgctatattggcacatgtcttttttctcttcaaatcattctcaatcatggtccatttctcaccaccccctcctcccaacttgttatcagttgcgcctgaccttttgggaaggaagaatctttaaaccctgtttgcatctcagcagacgggaatgcctgcctacttctcatctagggctcctttctctgcctttagaaattcttttttattcttgatacacactgctcagattatttattaatttaaaaattaacatacagtaaaaatcggggtgtgtgcacgtgtatacagttctgtgagctttaacatataaattgttgtatctcttaccacaattaagataacagaacagttttgtcccccgcaaaacttatcctgcctcttgtagtcctattcttcctttaccccagcccatggcaaccactgatctgttctctattgctatagttttgtcatttccagaatgtcatgtaaatggaatcactcagcataatgcctttgatattcatccatgtttaggagtgtggagaaatcgttcttttttattgctgagtaatattacatttatggatatagtacagtttatccatttatctgttgaaggaaatttgggttatttccagtttctggtgattataaaaaggtgctagaaacgtacaggtttttgtatgaatatagatgttcactagcgtaaatacctaggagtggaattgtatatttaacattataagaagctaactgctttctaaaatggctgtaccattttgtattcccaccagaagtgtatgagagctatagttgcttcacattcttgccaacacttaatcgtgtcagtactttttattttagcttctgtaataggtgcgtagtagtatctcattttggttttaatttttatttcctaatggataataatgttatgttatttcatgcgcttatttgccacctgtttattattattttggtgacttggtgaagtgactatttctgtcttttgggtttctttttactgttcaatttgaaaagtgccccatatatcctggatccaggtcttttatcagatatgtgatttgcaaatattttctctcagtctatagcttgtctttctattatctctcttgctctcttttttttttttaatttttttttgagacagagtcttgctctgttgccaggctggagtgcagcgatgtgatcttggctcactgcaacttctgcctcctgggttcaagtgattctcctgcctcagcctcctgagtagctggggctacaggcatgtaccaccatgtctggctaatttttgtatttttagtagagatggggttttaccatgttggccaagctggtcttgaactcctgaccttaagtgatcagctcaccttggcctcccaaagtgctgggattacaggcatgagccaccatgcccagctgtctttctgttctctaagtgtgttttgcagagcaaaagttttaaattttgatgacatccagttacttggtttttccttttatgagttatacttttgatgtcgtatctaagaaatcttcgcccaactacagatcataaagattttctccagtttttttcctagaagttttatagttttacattaagatctgtggtctatggccaggcgtggtggctcaccgctgtaatcccagcacttgggagtccgaggagggcgggtcacctgaggtcgggagtttgagaccagcctgaccaacatggagaaaccccatctctacaaaaaatacaaaattagccgggtgtggtggtgcatgcttgtaatcccagctacttgggaggctggggcaggagaattgcttgaacccgggaggtggaggttgcagtgagccgagattgcgccattgcactccagcctgggcgacaagagcgaaactctgtctcaaaaaaaaagaaaaaaagaaagatctgtgttctacttagatttaatttttgtagaaaaagtatgaagtttaggttgaagtgcgttttcttttgcatatgaatgttcagtgtttcaactctatttgttgaaaagcctatcctttctcaactgaattatctgtacatttgtcaaaaatcacttggccatacttgactctatttccagactctattctgttggtctttgtgtctgtcccttcaccagcactatactgttttgattactacagatttattgtaagtcataaagcggggtgacttgaattctccagtttcttatttctcaaatttttgtcgttcattttaattcctttgtcttttcacataaatttcagattcagcttgctgacttctaccaaaaaagcctgctgtgattttgattgcactgaatctatagatcgatttggggagaattgatatttcaatcatattgttttctaattcctgaacatgatatccttctctatttattaaggtcagcttctgttgagttgatcatgtgcttttgacctttattctattaatatgatgtattacactgatttttgtttgaacacaatctcacgttcttcatataaatcccacttagtcatggtcaaaatgtttatatgtttatatactgcattcagtttgctagcattttgttgatgatttttatgtctatattcataagagatgttggtatgtagttttctttgtgatatctttgtgtggtttttggtatcaggtaatactggccttatagtattccctcctctcctggtttttgtagaagtgtttatgaaggattgatgtgaattctttttttgaacatttggtagaattcaccagttaagccatatgggtttggccttttctttgtgagaagttttttgattactaattcaatctcttcagttattataggcctgttccaattttccatttcttctagagtcagtttcagtagtagttatttatttatttttcctgagaacttgtccatttcatgtaggctatctaatttgttgactgcatttcttttagaatgaattctcttagttttcatccctctgagattgttctttcacctgcatttcaaaaggatgcttcttgctaggtaaaggattatagattgacagctcttttctttcagcactttatcagaattgttcctcttctttctgacctccatggtttcttctgagaaatctgtaataattcaaatcattcttctctatgctgtatgttgttttcctctggctattttcaagatttttttcattgtctttagtttttagcaatttgtttatgatctttctaggtattgatttctttgagataatcctgctggcagtctgctgagcttcttgcagtggtaagtttaggtcttttgctaaatataggaagttttcagccagtatttcttcaagtatttttcctacacaacaccgtttcttctcttcttctggaactctagttccagtattttagtattttctttttagtattttcttacagatccctgagcctctgcttatttttataatctttttttctcttcatgttttacattagataatctctattaatctaaattcacattcactcactattcctgctattacctccagtctgcaattgaagctatccagtgacattttaagttttattgtatctttattttcaaaatttttgtttttgctatcattccatttattttaagagtatttagccttacttcttggagcatggttaaaataggtactttaaattatttgtttgataattctggtatctatgctatcttggggttggtgtcttttgattgtctttttccttgcaaattgagagttttccagtttttcgtatgttgagtaattttggagtatgttctagacatcttgaatatttttattctgagtcttatttattatggagactgtttatttccttaagcagataatcgacctggttgcaaattctgacctgacttctctgggctatgtttctgactttggttcagttttcaaagcctttacagtgtcattttagtctgtttcttttgtgtgcaatctattgttcagtctgggacctgggcaatgatatcctaaagtgaaaatctgaaggccactggcatacttttagggtcggatccacaacgaagagcttaaatgtgagcccacatgttaatatgcccctttgtgatgtaactctcttgagcttccttggttccctgatgtcctctttttgctgtcctccagctagaaagcgaggaatttagttcctctgttctcctgcattactttacgtgactgtgtccaaggccaagcgcttgaaggtcagggagaaaaagaagcaatggaaattcgccccttattctgggactacaactcttgtgagaatcattcttctttctcagagttttaggtacctgctccgcctgtgctgctgcttcttggtactgagggattgtctgggggctggggtgggagggattggaaaaaaacaaagcaatacagataatttctctgaacattaggagttcctttttttttttttttttttcctttgttggccagaaaatgagggttctcttcaggttatttctgtccatacccagctagcacttttggatggtgagctgcctttgaatccagactgggtgatactggagggggaaaacagtggaaaattctctgctggtttggtgatactctgagttctagtctcatttctcaatctatttgttgttatttacttttcagagtcctctgattcttcatgttttctgtctagcttatatatttgcatttggtaggaaagatagggtgggagttcttactccatcttgcctggaactggagcctctatattagtctgtttatttattaatcaaatcctgcatagagtgggatttaccaagcctggtttcttgagatcctaggatgtattcataatatgtatcatggaattctcaaataatgcttatgataaaataagcttaaattttccttactttaaagcagaggctggcaaatgttttctgcacaggaccaaatagtaaatattttagtcttgtggtctcatagtctctgtcataacttcttaactctgctgtcatagtgtaaaagcaaccacgaacaatacataactagtaaagatagctatggtccaattaaactattgaatgacactgaaatttgaatttcttatacttttcatgtgtcatgaattattatttttttgatttcttacaaccgtttagtaggtagtgggccagatttcgcccatgggccaaaatttactgaccactaatttatgtcatggatggctctatggccctgatcaacaactcctcttgattgaaattttctgtctgttctggagaaacaaagataggaaagcaagagaagttctagaaatcctatggaatgcttatggatacaacctgtaagccaaagtagcttctcagtcttcttttgaactccttaggtagggcacagagagagctcatagatgttttatcttaattcatctccatattactttgtaaggtaaatgctttcatcttcattttatggatcaagaaactgaggcacagagaggactgctagcatgtctcaagtcatgactaaactgggatttgtatccaggcctgtccagcaccaaagctgttgctcttcacactctaggatggcacaaatctcctttttttctgttttatcttgtctctgtacaaaaaagccatgtcaataatggtataggtcattgaaagccttatactttaagactgctgcgctctggtctggacttactcatgaattattgcataactctgggcaaacctcttcatttctcaaggtcttagtctccatgcctataaaataggggattggatccctattttacgtttatttctctgtcatggtagctgtgagagttttgtcagtgagcatcctaatcacagacagcgactttggaaagagatggtacaccttgtcattggagggctgtggggagttgtagagaacaagcttcatcctgggaccatgtgtgatggctgttgacatagagctttgtagctgtcaaggaaaatagagtaaacacactacttccttttgatcttcagtttttcgcagtatgctcctagatcatacttctcttgatttagtgatagccttataaattattgccactttctttgaacccttattggtataagtcggtgataaatgcttgagaaactgggccttgatgaagtactggtatacctcgtttggaatttgttctgaaaatggtaaagcatttcttaaaggctttgttataatatgaaaatgttcattgctttttttgttcattctataatttttttatcccttttacattgcatgtcttgattacatagttgatttgatattctctgaaatgtgatggaaaagaaaatgtaaacacaaaattaaaaagcagaggaatgaagacacattttgtgtgctgcttcgtgccagatagttttgtacatatccttgtacaaagtagtggtctcatttttaccacagtgagtaagcccctggtctctacctttaaggaacttagagtttgataggcttagtggttctcaactggcattaccctctcttgagggtatttagaaatctgtggagcagctgcaattgtcacaaatattgagggatgctgttggaatttagtgtgtgggattttatcacaatgaagaattatcccaccaaaaatgtttatagatctccttttgggaaacactgtgctgagtaaaatagtagtaatgataataaaaacacttgcatattgagcactgccattgtgttcagagaactctacagatacagtccatattctctgatatgtagctctaaattcagaaatctctaaaattgaagtgggttttttattaatccatttggtaaaatgtgacctgaattgatgtgagaacttttatttttttaaagctgagaactgtattttttatagctgtattgaagtatagtttacatatcaaaaaattcacctgttttaagtgtacaatttggtgatttttagtaaatttaaaaagctatatgtaactcttaccacaatccagttttataacattttcataaatgcctccccccccaaattctcttgaacctgtgtgagatgatttccagatgtttcactgaagaaatatggaagtgtttgattatggagtgctgctccagatccttcctgaatgctaggtattcattcattttgaattccaaatatacccggctgcagaagtttcttgtaagagattgtggactgtatgaacacatcccatccccacaataaccctggaaagtagatgctattattgttccttgttttgcagttcaggaaactgaggcatagcctttatacaaggctgaatggaatgtcacaagaaagtccagtgggggtccagaagagaaaatctgtgaccacttggcctgtaaccgaatttgcctatatttaaagatggaggaaataatctttttgttttgttttgtttttttagttgatactaaaggatatgcataaagtatttaaagtttaactcaagatccagtggatatgtgtggaccctcactacctagtctataactcaccacacctttcactcctttgggtgtccatccttatcctctgtccccctcccacagggatgaccactgtctaaaatttgtgcttatcaggccaggcacggtggctcacacccgtaatgccagcactgtgggaggccaaggcggatggatcacctgaggtcaggagttcaagaccaacctggctgacatgatgaaaccccatctctactaaaaatacagaaagtaaccaggcgtggtcgtgggcgcctgtagtcccagctacttgggaggctgaggcaggagaatcacttgaacccgggaggcagaggttgcagtgagctgagattgcaccactgcactccagcctgggtgacagcctgggtgagggcgagactctgtctcaaaaaaaaaaaaaaaaaaaagtgcttatctttctttgattctctttagttttaccacatatgttttaattcctcagcaacactttaattttgcatatttttgaagtttatataaatggaattatactgagtatattcttctgtaacttagttttccctcaataatacttcttagatttatcggtaattcattagttttcattgttcttttgtagaatataccatgatctatctatactttgactgttggtggacatttgtgatgttttctttttttctaaaaagagataattcaaatggtgctatattgaatagtcctcctgaatttttcttgatacatatgtgctaaggattatgtaggcatgaaatttcagggtcctattgtgggtacatcttcagctttattggatgatgcctagttgttttccaaggggttatataaatttatactccctccaataatttatagatgctaaaatttttccaatctaatggttctaaaatgatatatcattctgacttgaatatgtatttctgtgatgactaatgagattgagcatcttttaatatagccatttagttttccctttttgtgaagtgtccgttgagtcttatgtccatttttctactggtttgtctttttttttgagacagtcttgctctgttgccgaggctggagtgcaatggcataatctcagctcatttcaaccactgcctcctgggttcaaatgattctcctgcctcagcctcctgagtagctgggattacaggtagttgccaccatacctggctaatttttgtatttttagtagatacagggtttccccatgttggccaggctggtctcgaactcctgacctcaagtgatctgcccaccccggcctcccaaagtgctgggatttgctgggttgtcttttgaatactcatttattaaacttctttatgtgctctggatactgatcctttgttgtttatacatgatagaaatgttttttccttctttgtggcttgtccttttgatctctttttggtgtctttggataaacagaagttcttaattttaatgtagctaatttatcattttccattaggagtttttttctttagtttttaaattagcgtttatggagtactttgtatatcctagacacctttctaagcaccttataaatatccattaatccttataacattagaggcaagtactgttgctatttccattttataggtaaggaaactgaggcacagaatgttaagtgactttttcaaggtcactcaggtagtaaatggtagagccaggacttgaaccaaagctgtttaaggaattcttaagaaaaccttttctaccatgataagatgtgcagatattcttatatgtcctctgaaacttttttgtttgtttgtttttgttttttgcctttagcatgtaggtcttcagttgctctctaatagatttttgtgtgtggtatgaggtaggggcccagtttaatttttttccatgtggattatcagtgtttcagcacagattacttaaagtctaaccctttccccacctctataatacatgccttataacaaatcaaatttccttatatgctcatatctatttctgggttcattgttttagtggtgaatttgtctctgtgtcagcactgtactgtattaattagtatgcctttataataattcttgatatcagtaagtcaagtccttccatcttgttctactttatcagcagattcttggaaagtttcctactctttaaaagcaagattgcaggataatttttgactgtaacacacacacacacacacgtacacacatgcatacacacattggggctttggaagatgatttgtcattgctattgtattgacttgtttcctgaaaatttagcagatataatttcatttgagtggcttgagctctatttatctgcatggccaaaatctcaaacacacatgatgtagtggcttgtagaaagcttttgattcttgttaaatggagaggagggagaaaggaaaggaaaatcagtctggtagattactagtgtcttctgtttaagttcagttgcgctgataattccagaaaatatactgaggaacttcaaaaggcatgtggaaccttgtgtagtatgatttatactaatcatagtatgtgtgtatgattgtataaggtgaaaaacaagataatgcatcttctatgattaagttgccttacttatcaagtaagaggtaactgtaccccgttggtcttaaatagctgatatgtggtttggtacttaatactgtctattggaggaattgaaatagaatacccagagatacccagagtctccactgggaatacttctgctccccaaatgtgatatcagagtaatatcaagtagaatgtggagtacacccacctatcgaggcacaaactgccctctcccatgaccctttctctgtagaaagtattacttatactgtaaatagcagtcaaatttcaagtaacatcagttctctacatcttagccttttccaatctgggtggccaaagtgaagaatgattaggtactgaaaatttataaatgccgtgtctgagaatttctagacaatgggaagacacctccctaaggaaacctgtcagtctgaagtcttcccagctttcagagcatagcaagttcttaccatagcctggagaatatgtgatctgccagtgcctgctcccccttcacctcttactgacatcccccttctctctgcaagagtgactgccttgctgttcttcagaatgccaggcaccctttcaccccaagcatttgctctcctcttccttctgcctgtatgtgcttccctggatgggtgtttggtttactcctgattacctgggtctctgctcgaatgtcatcttctcagagaggtcctccctgaccaccctctcccataatagcacccacattcatctctgccagccctccctgagttcctacatggcacctgacacatattcactgtctgccctccctcgcttcccctccccacacactaggaagtcacttcctagaggaccagggactttgtctttttaactgctgtttcttccacacatgtgccacagcgtggcacatgggagccgcttgagagctgtttgctgagtgaaggaagctgttggctgaaaggagggcagagagggcctctggagcaggcccgtgccccaccagccctccccgagagctcctgcggcagcttgcttgcctctctgtcggaaacttgcaccatttaggcagctcttccatgagtattcttccattacatgctaagcaccttgagacaaaggtctgtcttaagttctttccctactgtcacccctgctgttttccttcagggctcggactgagcctggcacgctatttgctcatgctatttgtcttcagctatctgttaagaaggcatgcgggtagcagtcatcctccccaaggggagcagcagattaggcagcactgtaattccttaagcaaactcctggcccaactagcatttccattctgaattcctctatgtactgtctttgagtcttatggagacgataatcttggtgagaaaagggaccagccatattcactgcaggatctcccgtggatgcatagcatggtgccagaggcatggtaccccaactcagcacacactcactaataattcatcgctaaagttcactttggcctatgtgaaatttattattgttgatgtccaacattacactaaaattataagaatttatgtacaatctctgtacaggatctgtagggagcacacagtttttcattatgaaagaggcttcgttgctcatctcagctcctgtgctgttgaacaaaaggtgttagacacacacccattccctacttggggtattcacaaatgtcagacctcaaagtctcttctgagtaaattactgcctttgcttcatttaaaggtgcccttgtgaccttaaagaattcagccacctttcaaaatagagctgtatttctactcccacctcaccagagggtgagcctcaagtgtttgattacagaggagcgagaacttactctctaggattaatgtaataagagatgaagagcagacaacatagccactcaccgaaaaccatgtattcataaaaaataagccaagcccaaagtctggatttcagaatattttcattaataaatactttattgcaatgaacagcttaattgcttaatctctgtgtagttatggacatgtcttgtatacactgcctgggctgtatacactgtgtacactgctggctggatgggcttaggcagaagcaagggtcaaggcttttgccagtcttgcaaggcaggcttgcatcaggaattcctagagactgaggagttctcattgtaggtttctttctgactgaaagaagcatggtgcgggcagagcactaggctgcgggggttagaagaccttgcctcacgactctaaataagtcgtttaacctaattgagcctcagggtcctcccctaatggagacggacacatcaaggggctgtttggatcaaatgagatcatgtgactgtttgtggataatgaagttctgtggaaagaagatgggagggtagcattgcatactgtcttggtaagacctcagacttgcttagctgcagctcttcaccctcttacggacctgcagctgagcagctaagcgtgattggaaatgtcattcagctacgatgactggtattctttaaaatgaccactgacttcaagcaagaacttcacaccactggcattgatgctacattcaggaccattctttctcatttctagacagtgatttcatatattttcctctctcccgaaacctccagcaccttccagcctcactctcggccgatggctttacttcccatttccctgagaaaattcaagccgccaggagagaacttctcaaaagcgcccactgccacatccccctgcctactcttctgtccacagatactgctgcctcccctgttagcatgggtgaccatacacactccttgctaaggccagcttctttactcgcacaccaggttgcatccagccttgcctgttgaagtccatggcagtgccgttctcctgcctctctcctgctgtcagctttttcttctagactggatcttcccagtcaatacacacaaacatactcttgttaatatctcccacttagataaccctttattgattccttttcagtcattagctactaccccatttctcttttcctgtatggctaaatactttaaattattttccatattccctgctgcctattcctcctctcatattcctcttgaaactcatcgtcatcaggcttttgctccctccagcctaccaaatctgctgtcatcaagatcacaactggtcttcctgctgttaaatccagtggtcagtttccatccctcactgtacttgattccacatctagcatcctccctcgttaatgcactttcttctcatcttctcatggctcccaggataccacactttcctggtgttccccccacctcactgttgcttcctttcagtcttctttcctgattcttcctggccatttgttgtcttgttggagtgcctggaggagtctttaggccttctcctcctatttctatcagcactcgctccctcaatgatcttacccagtctggagtttcaaatccatccagaagctaacatctcatgcatctccagttgaggcctcccttccacactgcaagttctcacatccctctgcccttggagaggcacgccctgtcctacttaccctcccaagtgcttaccactgctcactggcttaggcgtacgtgttggccaggggttgtcatctctgtgctctccactagaatgtgggctccacaatggaggactccgtttactgttgtatccatagcacttagaagagtgcctggcacatagtaggtacttattcaatattttgttaaaggagtgaatgtgttaggtctccatatacagtggagattctagtaattcgctgtctcaggtcctgtctcaactctccctactagtattagggcgccctagcctttcagagatggtctttgtcttggaactcttactaaatctatttgataaaatatgattgtttctctagaactctgttgaattgataccaggcattcaactatgcagtattaaatgtattctttatcattgatttggggaggctatttgggatagtagaaagatctttgactttagagccagatacttctgagtttaaattcttgctctgctgctaaatagctacagagccttagtggaaacatacagtcttaggccttagttttctcatttgtaaagtgaaagatttggttcatagggctcttgggagaaattacatgctgaatatatgaaatgcatctagcataatctctggcatataacaggcattctatagtggtaactatgatgattatggtccttagctatacggataatcttaggattgcttgcaattcaaaactttttggaaaaaaaaatgtaattattccttttaaatactggccgttggtctttggttcagaacataattgtctaatttaacattgtttctgtggtaaaagttagatttgatttacatttcaacttacagagcctttttcaggaatttattctgcttcaaagatcaaggacttcctttcagtgaaacttaacgacagtgcttaggaatggaatgctctggaaggattgtcttctaattaatgagaaaggagcttattttgtgggggaggttctaaaatgcctttatatgtgcactgagcataattccaaagttatacagtaaacactccatgaatacttggttacttgtttttgctccagagatacttaactgaactcctctattgattgccctgaggtatagctatggaaagtagaggtgatgctactaaatacaaattcaacataggcttacaaatatcttagaggagcttttctggctttgaactgtaaacgtcaacggagctatattcatgataattatatcttgattgtatcttcttagggaaaggattgtcaatggtcctagctcaaaggaaattgaacaaagaagttaagatagcacatgcaaacatacacatccgtgtgtgcccaaacatacggactctctcacactgttaaataatgcatgagcaaaatattaagtgcaaggtacagtctaacgcatatcactctgcagtatgtggtaagtgccaaatgaacaggataaatttaagtactgtaatttcaaagaacgagtcattagcaaaggctaaaaatggtcaaggaaggcttcctggaaaaagtgagcttggagctgggcattgacagatgagtcacactgtgcctcatgatgcagtgtgcagaactggtccagccagggtcaagtggatggctctcaggccagtccacaccctcctctgggggaactagggcaagtctgctggctgcctcagtccttccctgtgaatgcagcccattattcctgaatcacatccttgtctgccattggtgattttgggtgcttcgtgggctttgggtcaaggcagggggttcttaagtggggagggcaggaaagggagtttaggatcacgtttgttgtggggaagtatctgaatgattcatttgctgtgcgtgtctgaatctttctttggagatgagttgatgagggcaagctttggctgtggatttctctctggtgatgtgatttgatttgatggataattatggaagagaaggaaaaggagattcaggattcagacacagaaaaacctgacaaacgattcacaaacacttttctccacccacagaaacccaaatacttagactgtgccttgtggcaggggcagtagggtggctggagagagctgtcacatgcactcacttgcccagctccatggattgtttacttggcagccatagctgtcgatagttggttatacgaatggggtgtgtttggccaggatcccgtagtctcacttaggcctttcataatagtcatgacaggttctctgtggtcagggaggctgggatagaggtgggggagctggaaaaggatgggccacctctgtcctgtccatagggtgacagccacagttctccataggaaccaaacctgcaggtgtgtcagttaaccatgaaccctaagcaggaaaataatatcgccttttttagacctccgcaatttgtgtctctgcataagacaatgagttttattgcaaaggcctagttacaaaaaagcgtgtcctgtgtgacgatgactgtgactgtcccaagctgttctgcttcggtaggacagtccaaaccagaaccaggaccaggcttgcttgacaaatcctctctaaaggaacaggtggtaggaaacttctgaccctcagcgattggactcaaaacattctctggaagtgccttagacattaccctggttttacaaatgagaaaactaccactctgtccatggactgatttgtttgaggttaccaaactcttcttgcctgtctctttctctctttacatgctgttaatttgttgtggactgccagatttacatctcttcccctgacctgttgctattctagacttgtatgtttcaaaagcatctcaagcttgccatgtgcaaaatggaatccagctctttctccaagcctggccactcccagcccttccagtcccagtggatggtgtcaagtccacctagggtgctgaccccacaagttgagcctgagaatgtcttggatttctttttatccctctaccatcgaaatcatcaacttttttggccctctctgcctctggtttgtttatttatttatttatttatttatttatttatttatttatttatgttttagagattgggtctcattctgtcacccaggctggaatgcagtggcacgatcttggctcactgcagtctcgacctcctaggctcaagcgattctcccacctcagcctcctgagtagctgggactacaggcatgtgccaccatgcccagctaattttcgtattttttatagagacaaggcttcaccgtgttgcccaggctggtctcgaactcataagctgaagtgatccacccgcactggcctctcaaagtgctgggattacaggcgtgagccacagtgcccagccttctggatttattttgaacctctccacttatttctctttgtctctgctaccacctccctgatctaaaccaccaccatcctttgtgcctccagtctcttctccacacagtctccagagtggccttttaaaaacaaagctgagcatgttccccgtctcaacacccgtttatagaccatctttatatgaacagaactcaggctttgtgctggcgtccacaggctgtgtgtggtccctgtctctctcctgcaaccctgtccatcttccctcttgcccatggcacactggccatatcagcatcatttcagtgtcctttgaatgataaatatttgttgccacagagctttcaaacatagttttccacctgaaaacttctttttatccattagtttgtagcttagatgtcgcctctgttaggccttcatggattcctccatctaaaaagtcctcccatatttttctctatcattatggccagcttgttttcttgacagcatcatttatgattgtttattaattgatctggttattctctgtgccaactgctggcaggaaagggctgacatttgttttgcacccccgtaggagcgtccttttattcccagctggcttcctattactgtaccttcccctcactcctccacacttgtctccttgctgttcctcagccgtgccaggcttgctgtgccctggggcctttgtacttgctcggccttcttttaagaactttttttaaatactggtatctatgtggctgactctcattttctttagatctttactcagagtcaccttttcagtgacgctagctctggtcccagtgtctaaaactgcacctgcccctgacactccatactgaacttcttggctttatttttctcctttgtgcttctccctatccaccatatggcacattttacttatgccatttattgtctgtctccccagctagaatgacatctccatgagggcaaggagtttcttctgttctttcactgttgtatgtccagtatctcgaatagctctgggcacacaggcactctatacatggttgaatgaatgaatgaatgaatgatttcatgaacaaagtgtgtccagtcactggcacatagtgggctctccttatcctttttattgtggtgagatacagtgtatcattttaacaaattttaagagcacagttcaatgacattacatttgtattgttgtgtaaccatcaccactgtctgctccctacacttttctgaaatgaaggagtcgaggaataagcaagtaattgagtgagggactcttggcaaagcagttgtacagtgtcgatctcttgacttggaggcccagggggtcctttccattgcactgtgctctggaggaggaagggcaagaagatgagtctgagccccatctcagggtgctcgatgcatgcagcaaggaagctcagtgtttccacacgtttcaggttgcctctgttctaaatgacgagggtgctgccctgtctccccttccttctgccgtgcacacacctgctcacacaggcaccatgtgtacacatcccttcctctgcactggaggaagcacctttgcaatatttccagctcatgggatggtgtgaaagggatatgctcattctcctttgaacccttctcaccggatctccatcatgaggggactctctctgcctcccttggtgttctcatcagcacctcgtcaggtgagtattccattgatggcagggaagtgtttatttttaattctaaagtaaatcagattacatagaacacaaaatgttgtgttggatcaaaaccattgactatgaaattctcccagatggatgaaaggcgggggcttgttttcagcccttaaccacttcttctcacaagctggttaaattctacgagaagtccatccttgcgagcacttcgccatcacaggcccttcccttggggagctgtggcatctcccccacccccagcacactcacaccccccagcagacgggaacattctcatgctcactgtcactcacgtgtgtgctgtcccacgtgttctcactcatatgcactaattacacacacacacccaacctgcaggtttgcttttgacacgccaggaattacatgggagcagccagagagcccaaagtaagccttgagatgactttaacccctgtgaagcccacagggtaagacccctgctcagaccaacgtgacaggctcctgctcatcacgtgagttgccctggattcctcgatgacgttgcaatggtgtcttctcaacaaaacctcattgaggtcttgagacaggggcgcaggccaggcacatctaagtgttcgaggtcttctttgttgaattccacagcattatgtgtgcctccaggatgtgcctggcacatggttggcctggggtgtttggagaggactgggtgtaggccggaccctagaggagcttataggacagtgctggcggcagaggtgcccatacctgcgtcctgcatgatgttgcgagcgtgatacccgatctgtgcacaggaagctgcgggagcttggaggaaaagagaaccttgctctgtgggatgagaatgcaggtcaaggtcaggggagagttcagagaggcacttgccaacctgaaggtgtggagatgctgccgtgcatgggcaggaaggggagtggtggggcagagaagtcagggtgtggggtgggggcatggttccaggaagcttcctattttgtcttgtcagcagtagataggaactggattgaatcgggattatgctcacttctattgttagctctgatcatttgttgtttgacttcctgctttcccactagagatacgagtacatggcaagagatttctgaattcccacaccacaggtgtggccatggtgcacagcattgcaaggtccagggtcagtcgtcattttgctggtaaggaaggcataaactaacagcccagtagacaaatagcagtgtcccttcatgcggttgttactttgtgagagtaaagacatacaccaattggtttaatgtattcgggtagattttctactagtcgtgtccgtttaaaaaaatcaccagtcagttctctttatcggaaaaggtactagacacctgtagttgagcatgtgctgagatctggtgttttgttaattgcagtatttgatgatactggcaaaagtcactaagagaatcctcaaaacatcttgttagaaatgggaagaatattccttgactggcaaattttttttctgttcttaaaattaagcttataaatggctggaaaaattagttattttttccaggctttagttgggaagagatttttgtgtctggtgggaacgttccctctctccgttgatgcttgagaaagctacaagacgctgatggtgttggtggcagctttgccttatcggctgtcctggatgtcttggcctcagataagacacttaacccacagtgggagcatgctgctgcttttcaactgggaaacgttaccgtctgtttccatcacagtggcccatgacgaagttgaaagatgcctctgacatttgttatattataaaaatgccaagaatctcctaaagtttgactcataggtcagtttgctttcttaaaacaaaatggcaaccaatgaaagttttctggtgagtgttatcctccgaaattttaagtggatttaaataaagttcagtccgtggatgagaggattctcagtgaaattttcagtgtgcagaattactcgaggccattgagcagagtcattgctttctgtaatgttttcccataagaacacaagaatctccatcctccatcagactaatagtttttccagtccagcattttgccactgagaatggaattaagggagttgctgtgggaagaccccataacccttccagccatcacctcaaaaacgtaggagtgtgctttaaatatgtgtaactccccttaataagctattatggagcccttattcatatgattcttgaatttgtctaaattgcatttgcagcagtttttattttgggctgttaccatctggtggaacgtggcgggcagtctgaacagcagccagtcaggatttaccccatatcaccaccaaaggatctcagtcctttatccattcaattttcatgctgattcatttgattcactaagtagaattgataaatgcctacattgttcacctatgtgttgatttttggctctttgtaagggcattgctttaaatcatgttaccagtcagttcttattcttcctcttaatatgtaagaagtgcagcttcttcatattggttccaaaggcacaactcaccatattttctctttcattttctacaggggcaatcggagctgtagagcctctggttggtaacacccattgtagaatagtggggtgtgggcctcagagagactgaggttatcgctggccccattgtttactggccatgtggtctggagtgctttgctgcatctccctgggcttggcttcctcatctgcgaggtgggggtaataggtggcttctcataaaattggactcactcagactccctcagttgcaagtgatagcccaatttcagtggacttctgtgaaaggtgcagctgacctcaggtggtgctcgattccagggggtgctggggaggagctgtctctttcttcatctctcagcaggggttgtctctgtttggctttctcctaggatgtggtggcgaaatagccactggcagccctggatttatatcttaccagtgtggcaacccagccaaaagagacagcatttttctaatagaaaaattagagaaatcccatggaggtatctaagtgcttggcatggggcacagtctgttctttcctgttgcggccaagggaggagagttttctggccctgcagtggccagaagatggagtcacttttacccaaaccacatggggaaaggattccccacagaaacggaggttctcaccaggggaagtggagggaggcatttacaacagtgtgagattacaacagtggccgccctggagatgtgagggctgtgaggcaatgcaggcagagctcctcaggcagaattctgtcatgcagaattcccagtagatggaatccagcctcttttttccttccctttactgcttaaggaatgcagcttctttagattgcttctaaaggcacttccttcaaacattaagttgattctacctttaatacttttataaacttttaattctatgtcctctcaacctggatgtgttttggaaagatttattttaagaggggggttggtatggcagggggaaatttcacttaatctgctttttgtcattcagtcaaaaattacgtatggagcctctgctgcatacagaacaccccaaagtctgtgggggatggaaaggaaccatgagaagcccctttcctggggtgtctgtggcccgttggaatgtgtggtgggtcaagtgtgtagattctgtggtataaggtggaatatgggcaagtgctgttagggaggtgggaagctggagggagcccagagtggagcagagccccatccagctgggacaatacaggaggactagatggagggggtggtatctgagccaggcctgaggaggggtgtggttttataggcatagctgttgggggcagagtggggtggaaggaggagtggcccagcagaggtgagggagagggagctgacagcttcattcttgatgctcactttatgccaggctctgggcatttggacaagtaacagttcattgctctatccaaggaagaaccccatcaagtcatgggtgcccagccgaaagtctttaaggggtcgagtgagggcgtggaggaggcagccttcaactttcctgaaaggcacagagatgggatggtgaggatgaatctgtgaaatgatgatgattcctgggtttctggaggcggaggtctacaaggagggtggtgcaatggagccaggtggtggaagaccttgaatgccagagtaaggagtttggtggagattgttgaggcactagttcttcagggaaggcctcatgggtgtgtgttctgtgcagttgcccagggccccatgctcagcttaatgctatggtattgtcctcttgaaattcttaatacttttgaaacaaggggtcctgcattttcattttgcactggacttgcaaatcaaagcatgcttgggggatgatgtactttagaacagagctgtgctttagagaagaggttgggccatagttgggaggctgtttgcatccttttgaggaagggggagtaaagggcccagacgaggatgggtatgctggggatggagggaattcctctgacagcctgtggccaggcccgagcagcaggcggaggaggagccgccatcagctcttgactgggggacattcttggagctgtcctctaagtcaggcctgcaggtgacttccagggatagcgttggtgttccaaacggcaattgagaagactgtcttaatatttttactctcaacagtaagctaaagctgacattggcagtctcattcaacgaatgtgaaataaccagaaaagacattccaaggcgttctggaatcaaacagatggatggagcaaacatgttaaaaacagtaaatcacaacttgaacttcagctaatcataattgcatttctctttccttatttaattttgaaacatcttcctaagtagttttttattttggttgcttttacttaagagaccttgttattatagggcaccccagttaaagatgcctcatatatgacatctgaaccaaaaaaccttatcatttaggacatgatatcctttctgaggtttgagaagtggctattttgtctcttacaaagatttgtagggaatttactgagggaattgttgagggactagtgagcaattcttgttcacatagaaatgaacaaaactgcatttacccagtgattttcaaaaacatactcccagtaaatcaaggttgctctgaactgaacttagggtctcaaccagctgcagaccagttacatcttagcaagcagggctttgagtggtgcagtgggcagagtgtgtggctctgacctatcaggtgtgatcccctcctactgtgcactgtttcctgtctggcacagacacaggcaaagcacttttgctgaaaggacagaaagactcaaggtgaaggcagtgccatgcaggccccggatgctgtgctgagtgtcttggaactgaggaagccgctgatggccagtggggccagggcagggcttgcgaaaagattcaaggcttcattccagtcacatggacagactggtactgcttttcacattcttatcaaaaagggctgcaggcaggtacaaagaccactgcagcctttcctgtcctcatggcattgccctacaactggccacctaaaatgaccttctctgctcctgcatccttttaggaatgggtaacttggtaccattcagatgtgccatgctgaaaaaatgagagtgctttcttttgagggagttgtggaggaatacatgatgtcctatatgggaggcccataaggttagtgaggtaaaaaaaagaatcaagagtttttcttgctctgctcattcacccatagtgatggagagatttgatttcatctggatgctcgtgttccactgacagtgagtactgctcagccagtgctcgccgccaggtagttaggtgtgtcttttacaatgtttagcacagcgaatagagaaagtgcctggcagatgcttggccatctcctctgcatctcccatagtaccaagtatcttgccttgtgcacagtaggtgcttgtctgtggggcaaatagatacatttgcagttgaagtaatcctgtttctctgcctgaagtaagagacattcaccatctgtagagtgggaattgtgacttcctctagatgcagggacagttttgtaataaagcatcctcataacctcacttggccctttttggcacaaagacctgtgaaggcggagaccatgacctattttgctcagcatttatttcccagtgcaaatactcagtatttgttgaatgaataaacaaatgggatacacctgtctttcttaaattgcagaagttcattgcttaaagtagccatgtatgtcttcatcaaagtttcttcagttctcaaaatcttctcatatatgtctgtgcatacacacactcactcaacccagcagttggcatacaatggccatttggtatttgttttgcaaaagaagttagtaagtggcagtaggtaaagaaaagggcactgactgggaggtgaaagatctggacccaagtccaggtttggccacctaagcaatctggagaccttgttaaggggctgggtatcctgtctcgcccagtcagaatcttgctgtctaaatggggctaatcactgcatatcttgaaggtggtttatccagctcacaagaaagaattgatgtgcagcgcttgtcaaagttaagccttgtacatgtgtgaggactttgttcttgtcaccgatatatgctcggatccccatgtttgatgtgtggctaatgtgtatgcaccttctccctagtccaccctgagagctgagggtgtcattttacctaaataaagaaatacattgttaatgtagaaaatttagaattcacagaaaattgtaagtaacaacaattacctgcagactgtagcccagagataaccactgttaatcttgtgggatgtttctttttgtacctctcctaggcaggtactttcacatcacacacacacaaagacacggtattacttcagtcacataaccattatttttgtatcaaatttacccaagtagataacccattccaggaaaagaaagagacttaactttgttgttctgttactttctcagggcctagtgcactatgagaccgagcaggtatttgttaaatacttaatggctttctggaacatcagggctgacaagattctgagttataatctaatgttctcagttgaagtgcaggagaatgaaggcctatggagagaagcaggcccagggtcctagggctggatgtagctgagctagaactcagaaatgtgctgttgtcttgcccacgtctactctctactaataagttaagaggcacatacaagaaggcccatctggttggtgcttctagcagagaagctgattcatgcttaattttgaccacatctctaggtttgtggttactgctcagaatcaggatagcatctgggtatctcgaagctgctgtctccagtggaggctttggactgatctcacaaagttatgctgatttctacatcagcctacatctggggtccttctcctggttatcattgtttgtactgtatgcacagataccacgcccttacttaataatccagccttggtggaagtatattctcctgtgtttttgttggaatataccaaccctgtattgccctgccctgcctttcgagcatcgtgaaaagaagtccttctttctcttggtggttcttgcctcatgctctcaccctccctttttgtggtgtcttactgagccagttgttcattccccagcaaacatttcatgtttacagtcctcaactaggctatactgtggaagattcagcagatgtgcaagcccaacctttcaggatctgagtcgagagagagaggggacattatatagagaaattatagctcagtttataaagtggccagtgacccaggagagcggcagagcacaggctgtggatcctgggtggcaggaggcctttgtcatggttattgggggtatagggagctgggcaggcagggatttgaaaagaggggcattagagcttgacttggaaagggggactgggatgtgaacatttggagattgcaggagaaagcattcctggcagaggaacaagtagtagatgagaagggtcacaggtggatccctaggtgggggtagctaaggattctcaggatctggttgctcaatagcagcaagttgagttctgcacctctgcaggccatgacctgggaaaacatcacctcccaagccccccactgcctttacttgtccaatgctattggtgcaagtagcctggcaagttgatacaaccagttttcctttgggacaagggacttggtgaggggatctgtggactcctaagagccttccagtggattccaggtgatttgggaacttcctaaaattgcacagatgattttgtgtacatgtgcacctttcccccacaactttcaaagatctctgttacccttgaaagtgtaggaggaagagggtcggcatgtggattaattttaaaaccatatttaaaaaactctcaaatcatgtgaagtttgtagtggaaagctccattcagtttgaaagccttcaccattctcaggcacagctcactgatctccttagtctgtgcacccctgatgggcaagattatgtctcatccctgcccagaacttggcctcagaatcttatttgtgatgtttgttcagggaataaaatagctttgatgtggatataaatttgcatgtgtgctgacttgcaatagagtggattttttttttaattgctacctctaggatcctaaggctgactttatgtggaggagacatttccaatgtccgtcttcctgcctggtccctacctgaccctccttattaagcacagggataagccttggcatgtcctgccagcaagctgagggctggggctgtctggcctgtacttgccaaatgtagtctgagctgtcttctctctaaaggactcttcagccccatgacccccaagtatagagccagacccaaatgtgcctcttcacatgttccaaggtgggcatgcttgggaacctcatccagcccctccttgacctgaggggtctgcagcagcagcccatgctcatcttaggcagtataaggactcctgtggctgcagaaccacgaggtgggactctcctcaggggctgcttcttggtgaatctgcactctatttataatcaaaagctctgccagatggacgtgaggtgcccagcagagggtaggaacactggcagctgccttggcattttgttaagtaggtatgcaagttgctggcccatcagagagctgtaaggtgctggaatgacagagccatttgttttcccttgtgacatggtctgttttataacgtggtgggtgagatcaagggagaagagtgggccccttcatagtttttcaaagtccttttttccttttttagaaaagttcaaagaggacattgactttctacagtcacaagcatcagcctgtcttggagagacagcagctgtggcatgtagtattttaaggtgatgagccaagtcagacaagtcctgatataggtggggtctggacatcctgagtgatcattctcatctaccactcctctatctgggccattctcattcattcagtagctcatggattgtctctctatctgggccgttctctttcattcagtagctcatggattgtctgtctatctgggccattctcattcattcagtagctgatggattgtctaatatgtgctgaggagagagggaatagatgcacatggatcctaccctcagcaagctttctgaacaggaggcagtggacacaaacagctgtaattagcacaaggtagcatgaagcatcgtaagaaacttggagatgtgcgctggcatggggctggggtcagaggtggttggattgatgttcctgattcctcccttctgggatgctcgtgttttatttattttatctaaaacctgcagaacctttaccacttgtttctacctttaacatcttattgcatttatagcctctctgttcatctgtctgtccatccatccctccatccattcaccatctaacatttaccatcctaagacaggatgcagaaggaaggaagactcagtgcctgctctcagggagctcacctttgattgcttccttatggtcccatttgtgttgggggttttgttccccagcttaactgtaagttccttgaaggtcaaagactgtcttcttcagtgttcttggaagttgaaaaatctgtttggtcagtggattgctgcagctgtcgtcttgggtgtatgtgcttaacaaaaggcttaagagtgtgtgtctgcagggcacaccagccttgctgtttgcagtgctgcacagatgactctattagagtcttttggttctgatttggaaatctagagtggtgggagggtgggaagggaggtggggaaaaatacaatgtctcaatagaccaagttcccaaaagtgtatctgcacttgaggctttcctgaagaatgaaaagcttaattcgtgccttttctttatgctacttgttcttttgtcttttttttttttttttaaggaaaagatgtgtcaatttcagttgcctaattcatttttaatatgggtcagagctgccatattcacacgctttgtctcatcacacctaggcttctgttgaaatgcttgcttcacaaatgaagtttaattaatagaaatagggaagtgaacacagggctgatgaatctggggagacatgacttggtgcctgcccagagaggtccctgggtcagattcctcccgagcctgttgtcagaggcagattcttacttagggagccaggatactgggagtcaggctggggcattcatcaacaatgcatagcatagatttgcttcttagcagatgtggctggcctatttacagttagaagaattgtcattgttttagaaaactttttttgaccaaaaaataaaataaccaccaacaaaaaacccagactcttgagttgaggccaggtttgaatctcaaagcaggttgacctattttcattacagcattatcaaaacttgtgattctacctccctaacatgcttttcctggtgtcacatgaattgaacacctgattcaagcaggagagagagagtgaagaccttgtccttgtctggggcggccctgtttcccactgtgctgtggtctgaacctctttgagtaatgcctcccagagctcacctgctaatgactgtgctccacctggggaggggctattgggaggggctggtccacgcagacagggctgtacctttcacgaagtgctttcacatcccctgtttgaccttgacaacttcccagtaagggaggcagtgcctgcagtgttatccttggtccacaggggaggaaactgaagctcacacaggcaggcagggggaaggcctgggagagaactttcaacactggcataccacggggatttgtgagagcacctgcctggagtccctgcctccgagaacttcgacttctttccagatcttctgctctcttatttgatttaagtagatccaaatatggttcaggaacaaagcaggccccaaactgtgtataggatatgtgggtaatgggccagaaagctcactcctctggaaaatgttggaaagtgacctctcctgagcatcccagtgacatggctggatgccctgttgagatatgagagaaggggctgggggacaaacccatggcaagggcactagctgaaggaattcatgcagaggagaggagagggcttttccactgacgtttccttgcctctattctgtgtgtgtgtgtgtgtgtgtgtgtgtgtgtgtgtgtgtgtgtgcattcctccttggaagatgagagcttctggtctcaaggggccatgccctgtttctcagcagcctcctcatctactctcttggttttcctcattctcttcgaggtaacaagtcctcacctatttttttttttgtggcaccctacagtgtctgcagtgataagagcaggtatctttaaaaaatcaaagccaaattaatctactttggttttttaaagtccccatggtccacaaaaatatttacagggactggagattatctgctagtattctaaaactaacagtaacaacgattctttacatttttatagagagcttcaaacattttagactatctttacttctgttttcctgttattcctagtacctctccagattagacaagatgatattaaatatttccatcttacagatgagcaaattcagacttagagacgataaggtactagccccctggaaaacaactgcactgaacctaggtcctttatttctgaacaagacaggcatcgtgttgaacttcatgaagaagataatctaataattgaaaatacatcaaatacaaggacaaataagagacgctgggggggtaatgtgggagaaacctaaccttgtctgagggtaaaggcagtgtgtaggtgagacatggatgctgagttggcctttgctgggtgaagagagtcaggaagattgtccagggcgtgatgtgttcctggaaccgtggggccccatctcagtgggccttgcaagccaggatgagtgctttggtttgtttttaaagctgtgagaagccactaaagggttttaagcagaggactgatgtgggttttagaaagactgctgtggctattaggcagaaacatgtggggaggggcaagaacaaaactggagagccagagcaggcagctgttagagttattcagggaaatgttcgtgctgtagactctggggtgactgaagtgggaagattcgagaactattggggtgtagaagggacagcagctagggattatttggttgtggtagaggacaacaggtaatagagactcaggattttggcctggatgtaatggggccattttctgagttaggtaactttttacattacagggtcttctctgggacctgcgggggcctgttttgggcaggagggcaggagcatggactcattttgggacatgctgagtttgaaatgcttttaaagtatgttatgtggaaacttcaggcaggaatggggacaggtggttctggagctccaaagagagaagtgggctggaggtgcaaattccagattcattgccacaaagtgaataactggaatagtggacaggaattagaccaccaaattctgtgattctttcgtctttcccgtacttcttgaggggatttataaactcaagctcaaaataggaacctgagctttaagagagatatagccacgtttggagttggtttaacaaaggctgttctgcgggtcccagagaagaccctgtaatgtaaaaggagaatctggtaggtaattggaaccaacaaatatacttaatgttatatcccagtgatggtgatctcagaactcacggttggttgtacgaatgctggttcctggtctctgtagaattgcttccttatggctgcacattccatcaagtggttctgcccaaatttactcaattagatcttggtggtgcatttcacaataagaaataattctgaaatacactcataatggtttcaaattttagatgaattctttggattaagacctaggggtatttccttggttgtagagaacacacacttttatgactccttgttatgaaggcaacagactgtgtaaaagaactctggagttgttggggcaagagctatgtggtgtttctccctgaagccctcagagggttgtcctcctcggatttcaagggacccgctctgtgaggcacactggagtctcaggggcaagctctttttcactgactcactcaccagtgtttgctgagtgtgtctcatgccttctttcttgcttgcccctggaacatgcacaggactcagacccagccctgcttgtggcctggggctggtagatctcatgcaggtaatcacggctgaggatgagctctgctttgtgtgagttctggatgaagtctgggggagtttggagacgggagatgctccttctgcctgggggagtagagaaatgcttcccagaggttatggaaggaaattggatttgtggaggtgactgacagatctgtgccccttgtgtcagtgtctctagctgcgacagacacatgggtcagcaggcgacccttgttttccctgagagcagcaaaggccctggtgaggatgtgtccagcactacaggactggctagctgctttcttttttacctttcagttttcaaggtatgaatttttaaccagatactttctaaccttaaagtgatttggtactcccaaggaatcattctgaaagttaggaaatttatttgtgattcattgagttgaactatcaataactgtaacagattccgatctcctttgtggaaaaaaaaagtaactgtcttctcaagtacaagaatgagagaaagggtcttgattaccattttgtcctgttcaccttttttggagaacacctttaatttcttggccacaccgtgctcgtcttcattttgcacagcaccactgttgtaactcctaaaacttacgcatcacggcagatgtgtgattctttcattctttagatctgtagttttcccttatacagaagttagtgtcttctcttccaatgtatttaaacctttaatgaatatttcatcaaatgaacttcatgtcttgtatttcattattaatgttgtttatgagaccctatcctcattagcataacttacaaactaagaggaagaatgatattttaggacagtggttggtgagagaatagttgcgcatccttctacacgtgtcaaatgtgggcctttagcgagcctgcaggaaaagctgggatgctgagtatgtgtctcgcctggggtgacagatggggtgttcatgttctgtgagctctcagccgtcccgagtgtgtggctgtccctgcagcatttggacgaactcccgccaagaggaagcctgggcatgggggtgctgtgaggcaggactgagtgtatgaatcaaggtcggccttgtcctagctgggtgacataagccaaaccccttgccgactcttcagggtcattttgatcttcccgccacccagatgtcccctggttcactgatgaccccgataactaatgtgtcattttcctctatgtgcttttcttttagagacaacgtctccttctgttgcccaggctggagtgcagtggtgcagtcatggcttactgcagccttgaactcctggcctcgagtgatcctcccttctcaacctcccaaagcactgggattacaggcatgtgccattgtgcctggccttgttttggcaaaaccatatggatgtcccatctaacactccagcctctcatttcaagggcccttttcccctttggccatccacttccacttgcataccctgggcctcatggtttgggtggctgtttcagctcctgaacctctaacttagtgtgctcctcaccagccttgcccttctctctggcctgcctgctcagcatcacccagggcctgttttccctgcagacctgggctctcctccttggccaacttagatgctagacctttcacctcacctcctcaaatccctttggtccttttcatcacttctgtgcaggacatcccagccctggatggatccagctagtggtcctggccctgcctggccatccagcctcagctcatgccactgcccctgcatccactactgttctgcttcatgagctgccttctgttgctctaaggagtcaactccttcccaccttggagcttctagaccgtgtcctctccccagatggctcctccctcacttcgtctattactttaagctccacatcatcatttgtttcctaggggagcctcctctgactgcctggttgaggtcaggcttgtcgtccagcctatacttaggattgtcacttactgtttgtgtgcttatctgttcaacacctggcccagggttgtatagggcagacctagtttcagaccttctgttccttcatgcccatgaaatgtcccagaaatcctattgccttggcatccaaatgccattgcccagactgtctcctatagtcagaaacagctcagaaagcttttatcagcatgagtgtcctagtttttggttcacaaaacaactgtggtcatcacagttctaattcctgttggttggttggagagtcagtacagagtattagctttgggccagattccttgagttaaatccttgccacttataactaggtgagcctgggcggccgggcaccctctcgtttcctcatgtagaaggtgatcatggtgcccacatcctggcattgccgagaggatcgagtgagcgggcataggtacttctctacactgagaagcactgagcacttggtgagcatccggaaacatctgctgctgttagtgtgggctgagctctgtccgctgtgggctacagaaggccctactgcctgtcctgcatttttctcttatgtatgggctttcagtaaacatgtttggattgaaatacacatttgaggaggcactggacccagacctttgagcctgtgattccaaaccctttcctcctgtgcagttgcagctcacttcccacatcactcagtcctgcctctaagcgacactacactgtcaccttccttcatcatcactgttggcgctttcacataagcaagggccccatgtatttttctcttattctctctgtctggaatactctaattctttccttgaatccaatgttctgttcacctcctcctttatatttttaattttttgttttatttatttatttagttttgagacagagtctcactctgttgccaaggctggaatgcagtggcatgaccttggctcactgtgacctccgcctcctgggttcaagtgattctcctgcttcagcctcccgagtagctgggactacaggcatgcaccaccacgccccgctaattttttgaatttttagtagagacggagttttgccatgttgcccaggctggtcttgaactcctgagctcaggcaattcgcccaccttggtgtcccaaagtgctgggattacaggggtgagccaccacacccagcccacctcctcttttaataccagcttcacaaacatccttcaggatatgtctccggactctgagcctgtgtgttgctctctgtccactcaatgctgtgtcgatttgccctagtaattggcaattataattctaagattataaactacagtatcaaaggtaagagcaatgtttcctctcccaggaactacacaaagcgtagaagaactcagtatttcctaggccttcaggaaaagcttgttgactaaaagaaataaccagttgacctggttttggtgtccgtttatttttgcgtggatatgaggtgtaccctgggatccttgttaaatctcatgttactcagcttgttttgtcaccagtgttgggcaaaactgggtgacaggctctccaccttctctgcccctttcttttctttccctgcttttccaggaacaccttgattcttctgtacgctagggtgtcatttctctcgttccttcagcagttcaatgagagttcctgagcactgcctacagtgtgacaggtgctcatctgagcgtgaggagcagcagtgaaccaaataggcagggctcctgttctggtggagctatgttctagtgggaagagaggtgataaaggaatatgtccacgacataggtggtgcttcgattctagcagggaagacttatgttgattggccaggaaagacgtctttaatgaggtgccatgtaggcagggatctgaaagaagtgaagggagcaagctgtgaggatagccagggcagaggggatgggcacccagcctggctgagagtgtgtgtgtgtgggggaaggagatgtttttaattggaatggagtaggggtgaaaggaggagctggaggcatcagaacatagaaggccttctaggaaccccctaaaagggccttggatgttactccgaattagatggagagctgtttgaaggtttttgggagcaggggacattatctgatttgtctaatgtcaccttaggtctctcatgagcttaaggaaatattaactcattcataggaggagggaagtaacttctgttttaaggagggacacttgcctaattcctctttgagtaaggcctaatctgtcagagtcgtggttggactgtgttctgaactgtagcatcccagggcctgaccctagttctgtttttttttttttagatggagttttgctcttgttgcccaggctggagtgcaatggcacaacctcagctcactgcaacctccgcctcctgggttcaagcgattctcctgcctcagcctcccaggtgcctgccaccacgcccagctaattttttgtatttttagtagagacggggttttgccatgttggcccggttggtcttgaactcctgacctcaggtgatctgtccgcctcagcctctcaaagtgctgggattacaggtgtgagccactgcgcctggccaatcctagttcttttactctcttgcttttgctcagcctgtaagtaggagtaggaagtttcaaaagttacaataattaacatattcacgcctttttcacggtctgggggagctaaagcaggtgcaggataaatgaaggaactgaaccagctaggaccaaaatcagtaatttgaaccaaacttgatagctactgttttgaaactgtcattcctacctataggtagataagggcaagagattataaaatctgatggccacgaatctaattttatgagacagtgtaatgataaaaggaatgagggaggctgataaatacagatctgtatgtcttccagttttagccagcttgtcttgtttctgagtttcttgagtttcttccctgggaattgttttaggcccaaatggtaagcaaaaggaatatggtgtaagtggaattaaataactccccccagcacctcctactttctctcctcagatgtgtgagtggtaaatactttggaagaaatacaccccaagcctggtgtgttcactctgctcccaaaggtgcttgggcagttggtggtgatgggagtgttggttgattgtagctctgtatatgagggtgtctgaggattgtaaaattatcaggaaatccctcttggtgttgaagtcatgagcaggtgcaggagaggtgaaaggaaagggcagtgggtattcttccccctcaaagtgtgggaagagcagtgctccaaggccacccaaggagctgggattttttccttctaagctggttttccctttctccccactcccaactagcacgtgggcagaaggaagtgctttatctgcctgctacagggctgggaaatgtggcccgtgtactgcctcagtgcttgggtcaccagcggagatggctgcagtcccagccagctctgcaggagcttcagtcagaaacgctgatgttaggatgcattcttcagggagctgcagcttttcttagaaggtggaaaaagagaaagaagtgagtaaggtgaagtcttagaagaaggaacaacagaaaccaagttcagtgacagcccaccaggcctggcagagtctgacaaggagtctgtgaggtagggagtgtgcacgtgtgtccgtgtgtgtaaaggctaatggaatgggagacgcccttgaacagaaaggctttcacccataagtgtgaagtctggttcgtcttagcgacaaaagttagaaaaccactttcagacaataattgtattattttacagcattcgaagcaacctgagttggtctcaaaggtggctccctcaggccttacctgaggatggggacagagttgctcaaatgctttgggattactgagactagagtcaggataagctcgatcccaggttcctcaggccatgcttttccactagccaattcagtcccttcagcaagtgtttgtcgagcacttactagatagcaggtactgctcttggcacttagagatatttggtgaaaaggtcagcctggagcttccattctactcaggagacaaatgagtaaatacaggaggtgatttagagagcacctgcctcctgtaggaaagaaagggaggttatgcaacagcacctggtaagggtggtcagggaaggccatgtggggctctgggacagaattttccaggcggaaggaagatacagaggcttcaaggcagaaagaaacatcattgtggagtaatggcaggtggctgatcccactctctgcatgcagaaaagagcagcagccttcttgaagccttcttacctttctcacgttagtacaattccacacccttgtgtgtatgtggcagccactgtcataggcatcagggatcctgcttttcttccccttgaccaagatgtgaagatttgtgatcagagcatcagaaataaagtcccttgagacttgcagattgaggaaaaaatgacaggagtcacccagatatgaaaatcagatcttgaattcgtctattgatcaggcattaggcatggtgggagttcagtccgtttcagctttaatgtcctgttgttttgctattgatttctttcctcaggtttcaattggtattttttccatgttgtctatacattggtcatctattttagtgatgctaattgtttagctattaaaatggtgcattagtcccacacaactcttataaacagctgtgtagtaaggagtataatctttgtatctgtagtcccccttagggttaataattaggtttttgacagccagctcagccggcttgttttcacagtgccctgtttcccactggagaatgcaaggatgcagtcacgggaggaccaggtggacagcatttggaggatttgggtggatctaagaatattttcatttggaagaacaggatggacaccagaggccaaaccaaggagtagaggaaaacatggcacctttcccccatcccacccctggaactttcacccacagtatagggttgccttgaagctctggattaccatggagctttcaatgagtaggaggagacatccatttgtcctctgtctccagctggccccgggaactattcaacatctgggattgcttcctgcggtgccccctgacccaactcaccagagtctaccgactctagacccactgttgtcctgggcccctgcctgactcttttacccactccaggatgaccctggtttctactgacacctgcctgacctaactcggtttgtctagaatgcagttgaagttgcagcaagggagatgaggaagggtaagaattggtgaaaaaaattacaaaggtttttcatggttcctaccctcgatgagtttacagtctagtcttcatgaggacatgtgctcatttgatcataaggcattttgtgacatgtgcctggaggtgattcagacagatgggcagggcaggagggaatgctggggtgtgtatagcaaaatgtgttattaaattatggcatctgttgtcaacaaccggtttagaccttcttgatctcctggggtttcttttcagttacagaattctgtcatcattacagaaacaaggcttagccacttactgctttaaataccaaaaagagatggcgaataagattgggatccatggggctttgagaacctagtagcgtgtgtgctgtatcacagttctcttctggctgatactggagagggccatgcaatgctggggacggacagctgtactagggagtctggattcgaattctggacatccctaggctcactgtgtgaccttcatcccccctccccccactccctgtaccctttgagtgcccctgccttcttactctgcatgtgtgtgcatgtgcatgtgtacccatgagtgtgaggaaggataactccagtgttgggggagagtctgccaggagataggtgccctgagtagtggtcttctcttgggcacttaccgactgtgtcattttggaaaatggccccccccaaaagatttccacatcctaatctcttgaacctgtgagtatgttaccttacatggcaaaagggatgttgcagatgtgattaacttcagaatcttgagatggaaagattactctggatttagatgggcctacccaatccttacaagagggaggcaagagttagccggagaaggagctgcagtgatggaagcgcagaagtcaagagtgatgtaatcacgagccaaggaatgtgggcagccttagaagctggaaaaggcaaggaaacaggttcagccctagagcctccagaggagcacagtcctgctgacatcctaattttagttcagcaagacccatttctgccatctgaccttcagaactgtaagatactaagtttgtgttgttttaagctactaaattatagtaacttgttatagaagcaatgggaaacatacatcaattattcctctggatattagttgcttcagctctaaaatggggacacaaaatgttttctgcctgaaggctgagaactggaccatgtgacttttggcattccttcaagttctagatttcatgagagagaaaatcgacctgaaaatgcattaaatgtttaaaaacatagggaagaaagaaatatacaattatttaatgtctgtgtatgtcatttaattcttacaaccacctgagagagattttataattattattttcttttagtcattcaagtatttgagtgcctatatgtgccagatggtgttctaggtgttagaaataaagcagtgaacaagaccaataaaaatctcctgtctttttgaagcttatctttagggagacagatgagaaaccataagcataattgctaagtgaatcatcagctaggttggcaattgatagctgggatggaagaaaattagagcaggttgatgggagcatgttactgactaggattgcaggagctcagagggtgagcagtttgctcaagaccacagcaccaggaggtagtggagtggggatgaaacccaaaatctgttggaatccagaggcctggtctgatccttttctcaggctagtagaaggctctgcctgactttgcctatttggattcccccactttactgagggagaggagtccccactgccagctgttgttaggacaattgctatcatcctgggtttcatatttttagctcctttcccatctctctaataagtaaatgccagagggctagggctaggctgatgctgggaatgagacgaggaacacagacggcacaggtcgcttcatgagttccagaggcttgtacaggagacacatgggccggccactgtttcctgtctctctgagggagctgcaactccagcctttcatctcacaactcaagttgcttttgctgcagctgaggcctgaatgtgcatttgtaactctggggaaaagggtgttcagttatcaacaattactattaggttggtgcaaaagtaactgcagattttgccactacaagtaactgtaaaaactgcaattacttttgcgcctacctgatatttttatgttgcatggccttttcctggcagtttgatgtttatcatttcctgtcattgaggaatgtgtttttctaggacagtatgaaggctttcaggatctttagagggaagctctaaaatgtgcttctctctccattaggttggctcatcagtcagattctgatttgaaaatgaagggtgcttggcagtaagaatagtggaagtaaattttcaatattatacattaacaagtcataactaataacttttatgggttcttcccatctcagatttcagagaatatttttgggttgtgttctattgatgagggcttaaagaaatgccttgttctggctgggcatggtggctcaggcttgtaatcccagcactttaggaggcccaggagggcagatcacttgaggccaggagcttgagaccagcctaaccaacatggcacaacaccgtctctactaaaaaaaaaaaaacccaaaaattagtttgggcatggtggctcatgcctgaaatcccagctactcgggaggctgaggcaggagaatcgcttgaacccaggaggcagaggtcgtagtgaactgagattgcaccactgcactccaacctgggcaacagagtgagaatctcatctccagaaaaaaaaaaaaaaagaaaaccaaagcaaagccttgtcctgttgtgcttggtttgaaactgccattccctttagtttctgcttactgctacttctacacaaggtcaagagaaagcctggcttcagaagaattacatagtcaacccctggggctagctagctgcagaagaacttgaacttttggttaattaatggaggctgggccatagctggcaaagcgggatgtgcccatgcctgggtgttgagagactgggtcttgacatggctctgcaactgtccatgtcatcttggaagatctttctgagttgggacagctgagaaacttcatgccatttgacagttttcttgaggtcatgagcaaattaaccaatcaaggaagtaaataagtaagttttggtggaacaaatttgtatgttattggtgtgcctttttttttttaataccataggtgtgttcctgatgaaaagggtgtgaataaatggaatttaaaatagttttccaatgaacggaatctttcacatgttaatatatcagggtcttctgcagtgacagctttgcctgaatttcatttttcacattagcttaaaaatattttaaagtaaaacatgttaattttgaaacatataggaaccagataaaggcaatatgttttttataaaatggaatcatatcctatcattggacttttggctgttttcctcttttaaccactataaaccatgttgcattgagcatcttggggtagcaaaatcacagattcctgattatttctttagaataaactcttagccttgaaattgctgcattgaagcatatacaggattttttttatatgagtcgcaaagttatttgctttgcttttgctttttgaaagagataaaagcttagacatcttgacattaaaaaaaacaaaagggttaatagcccagactttaaagtcagacatacctgaatttgagtcctggctccaccataacaagctgtgagaccctgacaatttacttcccatctctaagcctcagttttctcatttataaaatgggcataatatccttaaactcactgtgagcattaattgaatgacacgatataagtaaaacaccataccgtacatgaattctctatatgggaattcttactaatttgtacctgaacctctccttattcactagaagagtgtgaaaacttagtttcctctctgctccacccacggctttctagcagtcactgtaggcccaaggaaacccaccaccgtcttggtgcactgtaaccagggttgaggtgtctgtcctaattttgaaagcctgccttcagacatttatatgttcagacaaactaatcaggctgaaatttctcatgcttatttgcagctagatgaagcaatccatttagttgctttggaattacccaagcatggaagaaattggtttctcagccttgagatattctgcagatactgaagtacagatggcaccagggccagcttggtaaaaccagaaacaaggggcctgagtttggccctttgtcagggcctctgtccttgggaactggtggttccacctgggccccaacataagcctcagcttttcatttggccagcatgtatcatgaagttacttcttatttcaccctttgggggactctcagctgctcagagcttttgtgttttctcttttcagcttcctcctcaattgatacggatgaagtatttgctgaatctgtttctctttcctgaatcagaggcccagaggcattcatatagttgctttctggtaaaaccttgctgatctggtatttgggctgtcattagactgtagtgcaaaaagacgaggtgaattttgggactccagatttcagagtgtataatatctcttgtagttaatattcacaacccatgagataggaacagacagggaaactgagataccaaaagtaatgtgcccaaagacgtgcagctagtaaatggcagaactgggatttgaattcttgctgactatggttccatttcaactattactcaataccaccttttaatctgcttattataatgtatttcataactttctatgctgtggtattgatcattcattcatcagttacacaattattgcatggaaggatacaaagagaaaaagatatggcaatgtggtccttgttcttagggaattttcataaggtattaacaggagaagcaacaagataactatagatcataatataaaaatacctcccctctttgttagatagctttaacccccctgttcgctgaaggacttggttctgaatgattgaaacagataatcctccgtgattcccgtacatgtcctctgtgcccacctcccactccagcggtgagtccattgtgtttttcctttattggcaaccctaacgtgttggggcaccctctctaactccacagtacgttgtaagtttggtgttaggagagaaatgatctcaggcctgcacagcacactctttttctgttccctgccttttaaggtcatgccctcttgtcatgaatataagaatgcctgtgcccccttcggagaccggtgccactttcaggctgtgtgcatgctcactgcccctccatcctccttgagaaccatcgatgtgcacagagggttgtactgtttctctgtacatcccatcagcatggcttactcaagctttgcttcctgtcatatgtactaaggttttcaatgtgaaaatatgaaattacattctcatactaaataggctcctttaatccacactcctctctgagaaccaatccactttaccaagatctacccctcttggggctgtgctccctggttaagaacagctggtttagtagcaagggagaaggcaggagatgatttaaaacagaccctgggattctaaaagtcctgggattttataattcctgggattctaaaattagctgggaagattttgagtagcggaaaagagcctgccaactttagccatcctggataataccattctgttttagcttgatcactaatttttctgaccccatgtagaaaacgtatgtaaatcatggtggtggtagcagcagtagtagtaacaacaataatgataataatcatggcagtagctcccctttttttattttttattttttgagacggagtctcactctgtcacccaggctagagtgcagaggcacgatctcagcttgtcttggctcactgcaacctccacctcctgggtccaagcgattcccctgcctcagcttctagagtagctgggattacaggtgcccgctaccatgtctggctagtttttgtatttttagtagggacggggtttcaccaggttggccaggctggtcttgaactcctgacctcaggtaatcggcccgcctcagcctcccaaagtgctgggattacaggcacgagccaccacacccagcctgtgttagattagtgttagagtcaccttattgatctgtcaacactaggtcttatttcttcaatctatttgtacccattaagaagcctttcctcattctcccctctcctcacccttcctggtctctgataactaccattctactctctatcttcatgagagccacttttttagctcctacatataagtgagaatgtgatatttgtcattctgtgcttggcttatttcagttaacataatgaccctggttccatccaagtggctgcaagtgacagggtttcattctttttatggcagcataatattccattgtgtatatatgccacactttcattatctcttcatccattgatgggcacttaacttgattctgtatttgactcttgtgaataatgctgcaataaacatgggaatttagatatctctttgatatattgatttcctttctgttggctgtatactcagttgtggaattgctggatcatatgatagttctatttttagttttttggggaacccccatacagttttccatagtgctgtattaatttatatgcccactaacagtgtgtgagggttcccctttctccatatccttaccagcatctgttattccctgtatttttgataaaagtcattttaactggggtgaggtggtatctcatggttttgatttgcatttctctgatgattagtgatgctgagcatttcttcatataacctgttggccgtttgtcttcttttgagaaacatctatacagatcttttgcccattttttaaattgggcttttttttccccctattgagttgtctgagctccttatatattctggttattaatcccttgtcagatggatactttgcaaatgttttctcccattctgtgcattacctattcactttgttgactgtttcctttgccgtgcagtggtgcagctttgctgagctatttctctccagcggacgaagttgtccctcttggagagtgagatgcagttgcgtcacaggatgttgtcatatgctgggcatgtggcacaggtgaggtccctagagccgtgaaggccaggagggctggttgggaagcatagacctacatagcatgaaactgtgctcttcattttggttttgcatctgcggctttctgagagacctgagctgacacatggaacagatatggttctcccttgagaaattgttccaaatattttgatgtacttcagccagtcactgaaactctttagagtgggaataatgctcatgcttgccttgaacagcagtggcacagagtgattgaaagcctgagctttgaagccagactgctggggtttgaatcgcacctcggatattaactgctttaccttgggcaagttttgtaacctctttgtgcctcggatttctcatctgtaaaatgagacataataagaaatgtaccccttggggttgttgtgagaatgaaatgactttctacctttaaagcacgtagaacagttcctgggacctagtatatatagatggtattacactgtgaaatcatttgattctctaaatcaaatgagaatgcttcataaattgcaaaataccactcagtactcttagcgacagagggagaaaaaatggaatattgtgttggaagctatagtttataatcccacttcatgtggcagcaataaaactggcaagttattgatggggagcccacaaacatgacaggctccccagaacaatgatgcctcatctgtgcatgaatacccctggggaacttcaaaatccatatcctatggttgatttccagattcactgaattagaattttgcagggatacggggtactcaggaaggttttgtttattttttacagaaagatttccaggtaatcctaatgcagctgatgtatggactggtgtttggtaacttctgacctggatgctctaacagttggttatatttaatgggatgcaggaagatttagtagagggcctgacagcaggtatctacatttacataaattttcattaggtaatgcggatggagcaacacaggcagatttgtctggaggaaattctagacatctaaagacacctaaatcctggggctgagagtatggctctatttcttattgaggtcagttttcactggctgactgattcccttaccatgaagcacaaggttgatgggtactcttaattgtgtgaaaagtgggaagtgggaatagttgcaaagggagttggaagtaggcagttttgaatcctggcttgcctgctgcatactggatggaagctgcagatggaggaaacagtgcagaagactcactgagcaggcatttggatgactggccagcagatggggagtggagctcagtagatagccattctgcactcttcaggagagaagaacaacctggggccatgtgttcaataaagagatggggctggcacattgttgaggaggagaaggaggatttcaaatggagggctttttgaagaaggcattgaacacctccccacccacccctgccctgcacttctccctgtagctcagaaaccttttaatagccatgggaccaacatctagcagctggcttggttttgctggtccttgctttaaaatggggatacatatccctgctttacagacctgctgtggagttggatgaaatggtggatatgaaagtgccttaactgtaaagtgctgtacatacttacagaagcattggctaccatgtggagatggcgtgccccttggtattagtaggaggggacagactctgaccctctaccaggggtaaagccccaaatctaaagatctagaaacattagcaccttcatttcaaggtctgatatgtaagaggatggacattcctaagatttattgtgggcagagtagcatgctcacccctgatggtgacagtatccgtagtgggttctcactgtgggctgttgcatttaggccactggttatgcctgcttcccagagctcacatgtaactccattcctttctcctctactcaagaaggtgcacttatgtgtgtatgaaacagggacattattaaaaaggtaacctgaatctacctaattaaaagcacaataaattcaataggttattcagatttccatactgtactgttagaaataaatgacattcacacactgcatagcagttgtgaaggtgagaaccgcgactgtgggtagggagatcctccagacatcagcaattcccatgtagtgtgagaccaccgtggagggctcctttgtgtgtctggcaccgtgggaagttcttagggggacaaatgaggtatcattttctggcccctcaaagtactttcatctttccaggaatgtgtaattatgtgcccaaatgagtggaaggctcctaggttctgtagttgttcagagaaagaagggactcgaactaattgaagtgattgaatgagcagcacactgaaagctagctgtcaaatctgtaattataacttctgtgcagtgcatttgacattttacagcatttctataaggataatgaattctgatgccttcagaagccagataggtaacaaaaatcagggaagcagttaggaagactacacttggatggttagtattgtggtgaaccagaatgcgtgtggcccacctttaagacatggcgatccaaaatttaaaacagaagcatagcacagcacttctgattttcaaagaacttttacgaatgtcctgtttcatgttcacagcatcctatgatgcaggtctgttctccccttccagagataagaacacttaccaagatcagtaaaggtggagatagcatgtgacctggagactgcaatgccagtgctcagagctgtgagatgctttccctagaggccctgggtcccaggaccaagcccttggggaaagaaggtatcatgctttcctgaagtgtctgccctctccccagagcttccctagttattctctgagcacagctctggggagatgggcctctggacctgtttgtttctactgttaccccgtgacttaaatgggcccaggaggcaaagactaggaaacaccaagaaggctggtgtgggaattgaagaaaaccatcaactgtgtcaacagactggacccaataataggaacaaagtgctgaaatcagctttgcagtcacatttagttggctgacctgtgatttctcaactgtctcttttttatcttttaaccatccatgtcatttttcactgaaagaaaaagagaaatgcagagatccagatggagtcccttgaacccttgagccaaagtacagaaacccctgcactgtggctggatgcccctgaaggagggaggccatgtcagttacgattaatgtgagcagcttctctcattccagaaatgtgacctctggttacagcaaatgtgacaacatgaattaccttcaattatggtgaactacgtttaactacatgattgcctccacaccttggtgggaactggctgctttgatagccttgaccatggaagaaaaagacagtagaaaagacttggaaatgacaggcacctagaatctgagtcaagggtacagtggcaggccaagggctgtgggctttctgtattatcagtaaatgtgatatgtggtttgggctttgattcccaccagtgcttgagaaagggatagttacccactttattgagctaaaatttacttaaaacatatgcctttaagtatatattttacagatggatgttttgataagtatatacactctgtaactaccaacccactcaagatgcagaacactgctatcaccataagggtcccttgtgccctatctagtcagtcctcacccccaattcctgacccaggcaaacactgatctgctttttactactatagattagattcatctttttactattacaagttatattcacgtttcataagtgaaatgatatagaatgtaatcttctgtgtgcatcacaagtttgtcctttttatggctgtatagtagtccattgtatggatataccacaatttgtttatccctgtacctgctgttggacattagagtctaaacattggaaacattgttttggctatgaaaaataaccaggttttggctattacaaataaagtggctatgaacattttatataggtgtttgtgtacacacatatatgcttttattacccttgggaaaaatagcaaagactgcagttgctgggccatattgtatgtaggtggggttttggccctcattatttttgatgctccctggtgatacacctgtgaacgtattatgttacagggcaaaagggactgactgtgcagatggaattaagcttgctgatcaactgactttaagataggaaaattaccctggaagtgggcaagcccagggttatcacatggacccttaaaatcagaaagggagggcataagccaatcagagagacatggtagaaggagaggtcagacttaaagagtgagaactcaacctgctgactttgaagacagggaaaggaggccatgagccaggcattgctgatgtcttctagaaggtgagaaggacccccagctgtgacagcaagagtggggacctgtcttatgtaactaaattctgccagcaacccgaattagtctgaaagtggattctcccccagagaataagagtccagacttatagttttagcttttgcatgtagctctatgattcattttgagataattttatataaggtatctgtgaagtaagagttgaagttcactccttaacctgaatatccagttgttctagcatcatttgttgaaaaactatgcttgttgaataactttggctcctttgtgaaataaattatgtatgtgtgtttatttcggaactttctattctttcctattggactgtatgtctcttcatacaccaatcccactatgtcttgattaatgtagctttatggtgtatctggaaatcaggtagtataagttctccagttttacattaggttctttgtatttccatataaatttaataattggcttgtcaatttctataaaaatagccctgtttagattttgattgggattacactgaatctatatctcaatgtagggagaattgacattttaatatcaagtcttctgtccatgaacatgtatatttctcataatttatttagatttgatttaatttttttcaataatgttttgtggttttcagtttcaaatgttttgcataattttctaaatgcatccctatatcatttgtttctgatgttattgtaaatggtatttatttcaattttcatttgtttattgctaggatatagaattaaaagcagcttttgtatattgactctgtatcccataaccttgtaaactcatttcttagttactttttcggtgaattcattaggattttagacatatagatcatgtcatttgtgaacaaagatagttttccttctcccgttataatcggtaagcctttaatttctttttcctgccttattacattatttgaaacctctattacgatgtggaataggagtagtgacaatggaatccttgtcttgtttgtgatcttaggggaaagcactcatttcttcaccgttaagtatgatgctagctgtgggtttgttgctgatgtcctttattaggttgaagaagtttctttctatttctatttctcaggagcttttaccatgagtagttatggaattttataacactcttttaacgtatctattagaatggtcatatggttttcttttttattccactaatatagtaaatagcattaattgatttttaaatgctaaaaccaccttgctttcttaggataaacatcacttgattgtggtgatggtgccttatccttttgatatattattgaatttaatttgctgttattttgtaagaatttttatgtctgtgtacatgagggatattggtttatagttttctttctttaaatgtctggtattgttggcttcataaaataagctgaaaagtgtgccttcttcctctgctttctaagagactttgtgtaggattagtattatcccttaaatgtttgacagaatttaccagtgaaatggagtctggagttctctttgtggaaagatttcaagttaagaattcaagttattaggccgggcgctgtggctcacgcctgtaatcccaacactttgggaggccaaggcaggcagatcatgaggtcaggagataaagaccatcctggctaacatggtgaaaccccatctctactaaaaatacaaaaaattagctgggcacggtggtgggcacctgtagtcccagctacttgggagactgaggcagaagaatggcgtgatcctgggaggcagagcttgcagtgagccgagattgcgccactgcactccagcctggatgacagagcaagactctacctcaaaaaaaaaaaaaaaaaaaaaaacttcaagttattaaatagatataggactactcagattttctgtttctcttcatctgagctttggtagcttgtatcttggaaggaattttccaatttcatctaaggcatcaaatttattggcataaaattattcataatatttcctgattatattttcaaagtctataggtattctagtaattgtctttcttttatttctgataccagtaattcatttcctccttttctgcgatcagtctagctggaaatttctaagagtcgttgatgttgaaaaaaccacctttttcttcccttgatttttctctattgtttgcctattttcagtttcatttacttttgcgcttgccgttgttttttccttctttctactattttggatttaatttggtaatcttttctgtggtagaaggttgcacaattgattctagatcttttctaatatcggaatattggctatacatttccctctaagtactgagttacctatgctcagtttttttggtatgttgcatattatttcactcaaatgttgaaaatattttatttatcttctttgacccttggattatttagaaatgtgtttgtaaatttctacatatttgggttttgaccaacatcaaaaggtcaatcattgacttttaattccattatgatcagggaatgttctttgtattcttttaaacattttcaatgtattaatgcttgttttgtggcccagcatattgtctatcttggtagatattccatattaactggaaaatcatgtttattgggctgttaatgggtagaatgttttataaatgccaggttctataaatttaaccaagctgattgatagtgctattcttttgtatacatactgattttctttctacttgttttatcagttatgagagaggaatgttgaagttcccaactatacttgtggattgatttatcttttcagttgtgtcagtttttgcctcatatattttgaagctttgctcctggatgaattcacatttagggttgttatgtttccttgatgaactgatgactttatcattatgaaatgttcctctttctccctgttgatgttctttgttctgaaatttattttgtccaatattaaggtacacctaccttggaaagaccagttttagttgggctttattgttcactatgacaactctgtcttccagttgaagtgtttgtgtcatttatgtttgggttttaagtctaccatcttggtacttattttctattttttccatctatttgttgttccttttcccctttttctgccttcttttagtataattgaatattctttgacattccattttatttctactcttgccacataagctatatctattttatatgtgtcttctctgtatacgtgtatttaccatttatagggctcttcatttctttgcatagattcacatttccatttggtgtcattttccttccatttgaggactttgctttaacttttctgtagtgtatttctgttggcagtgaatcctctcagcttttgtttgttgaataaacttcattttactctcatttgggaagatattttcactggatatagaattttggattgacagtttttcttgcagcactttaaagatgccattctatcgtcttctggcttgcaaagtcagaactttcttttggccaggaactgtggctcatgcctgcaatcccagcactttaggaggctgaggtaggaggattgcttgaggctaggagctcaagaccagcctagcacaggcaacgtagcaagaccccatctcaacaaaaagtttaaaaaattggctggggatggtggcatgtgcctgtaataccagatgctctggaggctgaagcaggaggattgcttaagtccaggagttggaggctgcagttgagtcatgattgcaccactgcactccagcctgggcaacagagattgagaccttgtctcaaaacaaaacaaaacttttctttgattctgtgtacataatgtacacataaggtttttttcttcatttgatttcaagattttttcttgatatcagtttttgggtacttgattttagtgagaggttttctttgtttattcacctctggatttattgagcttcttggttatgtgggttatagtctttatatttattaatttttcaatcattattattttttgcttctacccctctgcccagaacttcgattacatgtattaacccagttgatcttgttcataagtcattgagtttctgttcatcattttaaaaaccaatctttaattaattttggataatgtaaatgtagccatgttcattaatcttttcttctgtagtgtctagttcaaggataagcaaatttttttctataaaagatcagatagtaaatattttatgctttgtggaccagatggtctgttacaatcacacaactctcctaatgtatcacaaacacatgcatagacaatacaccaaaaaatgagtgtgccagtaaaactttatttatgacaacaagctacggtctgggattaggtctatcggccatagtttgctgaactctggtctagtccactgttaattccatcacatgtgaatttttaattttaaacatcttcatttctagaaatttcatttgatttaaaaaaatatttgatatttcctctttcattatgcatgtttttaaaaatacttgaataaaattatgatagctgattgaaaatccttgattgctaattctattacctcctcatttctaagtctgtttctgtttagtaattttccaaaaactgcttatgggtcctattttcctttttcatgacaattctagtaatttttgattgaatgctgggtattgtaaaaattatattgtggagcatctgaattttcttcctttaaagaatgtgtaatttgttacggttgacagtcaagttacttgttgctcatagtgatcctttcaaagactgtctttaagcgttgttagggtgggtttaggatcaccttttagggtctctgcctaaaccccaagggatcaacaacatcttttgactctgatagttggaaaatcaaatgaatgctaaccctatgcgaatgctgggatctgttcagctcacagtttcagagttgctttttgcttagcctcatggagttttgtcctcacatctatgacttagtattcagcaaagactggagggtttccctcttcagatttctggattctttgccctgcagtgtctagccacctcagactccctacattccagactgtttcctcagctcagtgagacctttgtgttctgcttggcgcccccactctctgcttcacgtttcagaatgaacctccaggcagaaagctggggcagtcgtgaagctcacttggtttgagagaagggagcccatctctcaggcattacagtcttcactgtctgtcgttgaatactagaaatatttgttttatatttttccccagttttcaagttgtttaaggcaggaggataaatttggtccattttatttcatcattgccagaagtagaaggcagtcgtcacctttttaaaggtgatcatttataaacaggccgaaaaatgcagttctgtaggattaaagggaaatttcagtttgagtttttaaaagtgagacagttaataggttatgtaggtaagagggcactttgcttctgtgcaaacaccacagagtatgctgctgagttgctctgattaaccctaaatttgtgaatttaagcttataaattaaattctctataatgtatttatcaagtgccaggacagagctattatggtttttctatgctttgcattggcttctgcaaattaagtttcatttcccttttgaccacaaagaagatggccctattcaagacttcctcgttcataatgcctcagtttgttatccctccctcttccctcttcttcctgtacttcctgcttctcagtaatgatagttgttcttgtgatctagtagagtggaaagagcgtagtatctgaataagaaaccagacgttgtaattctggagccacatctgactctgtgacttgggatgagacactccagccctcagcatctgcttcatattccttatttatataattggcacggccatctgtgtgtgtgtgtgtgtgtgtatggattcaaatattttaaaaaggatgtgagaactctttggaaaccataatacatgctgtgagtgtaaggtgtttttgaggtcactgtgaatttcctcactgagactcaacctaacaatggaaatgtcttcttgtcccactaaacgctcctgcagaaatacccagcttctgcttggattgagaactgtcactttctgacacttcttccttatattgtattgatacaaggtttcgggcagtttctgctttttgtgatagctgtgctgttggatctcacacttgctctatcaatctgtatctgtaaccaggagacagaaatcacgtagtaatttgaataactaaagttcaatataagaaattattaaccatagtggaattggagtaatgaaggattggctagtaagaagtagaactctaaagaagataggaatagataataagatacagctaggtgtgctggcgcatacctgtagtgccagctactaggaggccaaggtgggagggtcacttgagcctaggagttcaagaccagcctaggcaacatagtgaagcccccaactcaaaaaaaaaaaaaaaaagagagacaagaaagtacccttagggctgagatagagcacttgaggaagacatcgtcccggggctgagatccagatcttgttgcacagagcttgactgtggttcactgaatggcatagaaattgtttttgtgtcatgaggatggtggggaagtctctctggtcctgtgctggtagaacttgctggaaacctatcctctggaatttgccagaaatccgccctctagggtgccaagggaagatgtgggagatatctcactggaggcgctccatttagaaactccccgaggtgtaggaggtggggatgctggagaaagtgctggccagtgggtgctgttgtccacaggcactgtaggagctggccctggagaaggcaggtacactgcaggagtgtgctgagtgagcacagtacaaccaggaacaaaatgctttcttcctgttaaagcgtcacactttgccagttgacaaaggaagaatatttataaggcccacattcgtttcacagaacaagcaaacagggtgtacttggaatggagaggtaatcagtgtataactggtacacctcatggctactcagcttccatacgtcccttttgtgtgaactcctgtgtgtcataacaactgtctctacctagcaagatgcagctaacttggttacaagtgaagaagttatcaccattccccaaaatgaggagacacacagtgccaagagtcaccatactccttgctggctatcttaattactcctcaaattcatcacactcctgtggaatagtctgttatctacacactaaattgtacttcagtaagttaactatgttaatttcccacaacttgtgtagaagatcaaaatgggaaggagagagaagaaaatgactaacacatttaaataagatgcaaagataacaggcaaatagaaaatatgcaaagttgctgcagccttcattttttaaattggtcaccagaccatcattgacatccgtggcttcattttttccactatctattttatgtgtcccctgctctcagccccatcacctgctgttcaggcttcttcacctggtagagggacccaaaccttccttcctcaggggttcaaatcttcagttctcctgcctggttttggttgctgtaattctctattaacctttactagaagccatggaaataataagagatgcaccagaggatcacccgggttccagacctggcctctttgcctagattgggtagaagcaacccggttgccctgtgctaatcataagcaatcacaacagacagtagattaacccaccctttcctgcctgttggtttggtgacataatgggaccaaagtgtccaggtgctcatcccgtgtttaaattcggtggaaccactgctttatagcctggtggaagaatccccatttcctcccttggggaccaagatctccaaaccagtgggcttaaagttgctgagacaggaatgaaatattctgtgcattgtttattagcgagaggagccaccctcactttcaccctttgaattctggacccacatattgtagctgtgagagaggctgcaccatatatgggtttctggtccaaagcatatgctgcattctatgaaacagaattctactcttcaggttattttgttccaactggcgctgtaacttgggtcttttggaagcctttctacttttcagttagggcagccacttctgggtgacaaggaaatgtcaaactcctccttggcagttcttttttgacactgtatcgatagcaggtttgctgcagtttctgtatttttgttacagctggcctgtcagttctcatacttacctgctttccagtatgacttgatgtgtgacatcaggtaaatcctttcctctctgtggacctttgagtctccacggaagagtgggaggtttagacttgatgatccttgggaaactttccccttctaaagcattcttgctccagtgaccctgcagggtgagggtgagctcagttgggatggtgcaggtgaagtgaattgtgaatgctaagggctgtgcacgtagcagggttgaggtatgatgtgttcttctcactatcagtggttgtgatcagcgttcgactttgaacctacctggagctgaagaaagggtaccggccccccggttcatatcatcatgtctctgtttcaggacccctagaggcagtgctcattctgtggaggtgggggaagggacaacattgtggagagaaggctagaaaaggaatgaggaagaggttgacattcccagtctgtgtcttcctgtcccctctttctctgctctccctcacagaggctcacacgcacattctgtctctctgccatccaaacagatgcagctgctctggagtcaaccagacttaacgaggagacaactcttctgctttcttccgtcttcttcctacccaccccctgacctaatgctgtgcttgcctgttacagcaggcctaggaggaaatgcactatgccttccctgtttttgttttgtgtgtgttttgagatgcagacctaaaaatattctgctgtataatcggttatccaatcagccatgcgaataatcactgtgccagagcctataggaaatgaggcaggagcctgaaactcagaagcatgccagctttgccttgcctttttttctttttttttttaaatgtgctcccttgggatctgggtttgagggttgagataggaggatatgctgggtgggtttccatggaggcaggtgcaggacactgatggtatgtctccctggtgggttgaggggaaagaatggttggtgtcacagtaggagttttgcacgtagttgaggcagtttgacttatgcctcttgaacctctattccctcctctgggccttgcttccagatgctgcctccctcccccagcacacctgcctggaatgttctctctcctcctctctgcttttccaagtcctgccgatcccctgaggtctagccctctatgttgtcagcaggaccaaccattcatagcggctgttgtctcacgatactcactgttgatagcagaagcatccagctcccatacctctgtgtagggcttgtgtttccagagtcactgtgtgctctcctctccactgtctcccccaattctctccaaagccctccgatgtcagtgggtggggtggaggtagtgaggggaggcaggaggaggtaggtagtttagtgtttaggctaagagcacaggtcttggagtgacagatttgctacttccatgtaacctctgttaaattctttaccttctaagcctcagtttcctcatctgtgaagcactgaaagtagtattttcagtttcataaaccctagggtttaggggtgttatgacaattaagtgacgcattgcctgtaaagtacttagcataatgactggctcctaggcaatgctcaacaaacatgaggtatgacattgtaattatcaccatcccactttacagctgaggaaaaggaagtgtggggagcatgggcgacttagttcacttgtacagtaattgactacccagcaaggactatgggtggtcaactaacaggattattcagggctggctctaagcccaaccaagtgctagatgctgtactggaacagtgactcaggcactcagctagggacgcagctggggaggtagatatttacatgtgagcctcaaatgtactgggggagatggaatggaggcatgtgtgcagtggaaagagccctggacttggagaccaaacagaagccctgtaaggagagtcacttgtctatcatttccacccttttgtccccagcacccaggccaagcccaggtatgttttaggtgctccatcagtctctgctgaaggaatgaagaggagccccgagccacagctctggctgggcctctgacctggggaaccttgaacagctctttgcatccaccaagtcacagggacctcctcagtacagggaggggttggacctgtagggacccgccagctcttgtggtcccacttggtagactcgacagctcctagcagctgcacagtacccagtgtgtgtctttacctcagttgtgcttttggagaagcagttggagaggtgagggcatgaagggctgggctgacgggcaccaaggtcgcccaggtgctggcagtgctgcagacagcatgtagctgtcctcagatggcccaggtctggctgggctctgcaggaacacttcagctcatgggcagcctggatttgtgctgatgcggagacttccctggcagccacagttgctgctgttgctgctgcctggtcagagttgagggctctgacaacagccaccacagctcgcggtctgtccactgctcagaaacctcacacaagaaaacttctgagactgcctctgaggccctttagatcctgagagccccacactcacactgcagcctccccaaatacagccagaacccacccgcttctggttttccatgtggaccatttattgcacctgcccctcctctaggcatagcactgcactttgggctccacccggtcctgctcagatgttgtgctccttaaggaatctctgctcgttggtcagactgactgttttcctccaagagtgcactagagtgtacttgcttctgtctggcgctttatcatctgtaaggcagggcactacagtagttgacgggctggctttgctgttgcacagactgagattgaaattctggccctgctgctccctagctgtgtgacctcgggcaagtcacttcacctctttgacctcaatatcattattggtgaaatggggttaataactcttaggtcctagggttttgtgggatgatgcacttgtacccctttgcaggcagcccttacccggcagcccccactgccaacgtctctgttgtgttcaagtctgtttcatgagccagtgtaacctccctccatgcagaaacaacgctgtaaagtattagcataacagtaggtccattgggcagaaaccacaccaataaaacgggcacaccccacagtggctctgatttccacacccttcccaaccccgcactcccaagccttgcccagggctttccatggactgagcctcagtagaaagaggttgaattagattttgaattttctcatgcctcctgtctcctggccctcagaaaattaaaatccagcattggaattagtcatggaaaaatccccattttctttcctttcattcctctgtgaagatcataggttcaggttatttctttgaattaattggctaagcctcagtgaaacatgggtaatttacctggcactgtgaggtgctggaaattataaccagtgctcctaaatggatatgcagcaaccaagcaccttcatggtgctgatgggtttgtcctcacagtgctgggagatggctaagcgggtgctgtggctattaccatccttactttagaggactgggactcaagccctcatcttgtggctctaaggtgaatgtcctttccctaacatgtctgaccttctccttcctcggcattgggaccctgggtaggagggccagtagaagatccctcagcagaacttaactggccaccagtccagagtggaaggctgctgcttgtttaaaattttaatccctttctttaagtgtgaagaatactgggcaagtgtaaaagaagggaagacatggtctcttccaaccagaaatgtataaactcgctgcagtgcctaggacacatgcgtctttattgaacaaatagttattgaatgtccgcttggtgcctggccctgtgctaagcattggtaatatggtggcaaaatagaaaagatacctcttaggcttctggccatgggcacagacagttaacaaggataatcaagttacagattgttacaagtgctatgaagaaaatttatgaaaaattaaatagcaatgtaagtaggacacactaaaataatacactaagtatcatgtatcagctctggctgcctccctctctttaaagcagagaagtccaggctctcaggggtgcgacagagccaggacaggtgtctagtgagcggcctttccatgggcagtgtgtatggaggggcctggaggtgtgggagtggccattttagaagggtgttgagattaatttctaccgttagaacccagttctcgtccatctctcttttcttcttctttgtttttgagacagggtcttactctgtccaggctggagtgcagtggtgtgatcatagcttattgcagccttgaattcctgggctcaagtaatcctcctgcctcagcctgcccagtagctaggactacaggcacaccaacacacctggctatatattttttctgtttttgtagagatggggtctcacagtgttgcccagactggtctcaaactcttgcgctcaaaggatttcccctcttggcttcccaaagtgctgggattacaggcgtgagccatgattccccacctggtccctctgttaaagcagaactcacagaagaaagcccaaaggaacaaaatttgtactttcatgatgtgggaacatctcttccagttgagaactctctaaagcatttgcaatcatagatttgtgtaagaacttgatttgcaccctaaattttgggatgtatttattacataagcagatatacctggatttgcataacagaaaggactattttggggtgacttatgacagatctgctatgtgaaagcctccaggaacttttagcatcagttgagacctgggggaaacagagaggaaggagcgtgcaggcactgaggccagaggaagaagggatgtgcctgtcctcagtggctagccatgacactgccagaggagcactgagaagggagcaagaagagcacttcctaagtggcgagaatacccagctgcaaacaaaacctcagacacagcctgaagctctgtgtccttttgtgcagccccttccttaccccattgagtagcagcttggagaagagctttttattacagatgacacctatgaatgcaagtgagggaaaagaaccgactaagccagagctgtgaattcccagaaatcaatatggacgggactggggatgcagctccctcagcttctctctccatggcccctatttgaggctgaatctaggaggccctgtgtttttgatacagtgtctcactctttttctgaggcacttttcaaaatttctgtcccagtgctaagcctgggcgagctccacagagctaacctgtgtgtccagagccagccctggctgtttttccagcttttccttatgccaatagtaagattagggctggggacagtggtggcgagagagtcaagtgtgtgtttctcaaaagttgccttgggagaggagtgaggtgaaaggaatcaaggcaataagtgtaacataggcttaaacatacttgcatgaagaaaacaaaggacttaggtataaacaaatgtttctaagacagggcacaaaaagcaatcatcataaaagtctgatacagtaacttcatcaaaatcaaaacttgtgttcatcaaaagatgctgttaagaaaaagtaagtaagccactaattgggagaaaatatttgcaaaacatctatctgatgaaacatttgtacgcaggacaaataaagcatccatgcaacacaataataaacaagcgagcgatttttttaaatgggcagaaaatttaacagatatttttaatagaagatataatggccaagaggctcataaaaagatgttcaacattattgttttcagaaaaatgcaagttaaaaccataggacatgctactacacacctaccaaagtgactaaaatgaaaaagctaataaaactaatgttggtgaggatgtagaacaactggagactcttaacgcatcatcggaggggctgtacaatggtccagacactttgggtaaactttttttttttttctttttttgagacagagtctcactctgtcacccaggctggagtgcagtgacacgataatctcagctcacggcaacctctatctcctgggttcaggtgaatctcctgcctcagcctcagcagtagctgggatcacaggcgtaagccaccatgcctaactaatttatgtatttttaatagagacagggtttcaccatgttggccaggctgatcttgaactcctgacctcaaatgatatgcccgttaggcagtttcttataaggcctgtgacccagcaattttattcgtaggtatttgcccaagggaaataaaaacatgtccacaaaaatatttatacacaaattattatagcaactttattcataataagaaaaataatgcggccattaaaaagaacaagatcatgccctttgcagggacatggatggagctagaggccattatccttagcaaactaacccaggaacagaaaaccaaatactgcatgttctcacttataagtgggagctaaatgatgagaacacatggacacagagggcaacaacacacactgggtccttttggaggttggagggtagggggcgggagaggatcaggaaaaacaactaatgtgtactaggcttgatacctgggtgatgaaataatctgtacaagtttacctgtaacaaatctgcactcgtacccctgaacttaaaaaaaggtagaaacagcatagatgtccgtcgggagaatggataaacaaattatgatatattcatacaatggaatgctactcagcaagaaaaaggcatgaactgtgatagagggaggtaacataattatgttcaatgaaagaagcctttttttttttttgagacggagtcttgctctgtcacccaggctgcagtgcaatggctcgatctccgctcactgcaagctctctgcctcccgggttcaagccattctcctgcctcagcctcctgcatagctggcactacaggcgctcgccaacacgtttggctaattttttgtatttttactagggacggggtttcaccgtgttaaccaggatggtctggatctgacctcgtgatcagccggtcttggccttccgaagtgctgggattacaggcgtgagccaccgcgcccggccgaaagaagccttaaaagagaaagcgcggtgtatcaaaactcactaaatgccacatctaagatttatgcatttctcaatgtgtatattttactttaaaatactcataaccaaatattaaactctagatggtgatatacatgtgtcagggtttaggggttgagtgtacagaggtctgcaccttcttttgaaatgtatctaaaaataagatagattgatggatgggttgagggatgacaaggtgtgtgataaagctaggaaaatcctagttgcacaatttaggtagtggaattgtgggtattcactgtacaattcttgtagcttctctgtgtatttgaagatgtttgtaatacaggttggaataaatatgctcaagtggaggatgcaagttgcagtagcatgaagggaagataattatgatttatcaccctttgttacacagtgctattttgtttatcttctttaaaattccattaaaacccaccacaggagcctttgcaatgtagctgatttatcaaattcagaagaatacttccagcgtctctgactcatttgatcacctggatacctttgagttaatcttccagccacagctctgattctccccttttgactgtgatcatcctgaaggtgtttccctcaatgctgagtgcttggagccgctttagaattgctttcactctctgttaatttggagaacaaagaatcaataagtagaaggagattgggaaattagtgatcggggacggtgcagagttcataaataatttaaaatatacagagttctggcttttcaacagagattttaataaaagatgaacaaggtcatcttcttccttctgatgaaagttacccatctgtagtgccatggcggatgctgtgtacaagagctgaaatggtggttcctgttaactttgagagctttggacaaaaatgccagatacatccttctagatagcaatatcaggcgagcctttgagtggggaggggaagttataaaccactgtagagaatcacagagtgaaccgaggacagagattggatcaacactccattccttttctgttttcttggaatgaagtcagagcaacattgttttcatttttgtttgcagtgaacctaatttttgaactgatctatgtagtaataagcacaggaaaggaaaagtggaagaaaggagattcagcacattagctagtgaggtcttgcgtgataacgaagacaacacaagcctgagccctcctggctagtgaggttggctctgcctgcctttgcccatcccaccaccttctcccgtgctgagcctttcccagccagacagtgttttgaggggcctttactacccctctccctgccagccccagcctagctgtaatcacccatctggaaggcgtgttttcctggcatttacctcccattatatggcacttcacttgggaagtgctccaacagaggcactctgctgtatcccaagaagccctcaatggcattaccgtaattctgtttatatgacgcacccccaaattcttgagctgtggctgtgacagaatcagtaattggaaatagaatttctgtgatagtcactgagttcccccaagtattaggcctgggagtggacttgtccaggtggtatccgtgggattgtgtaggggcaaacagcgatggataccctgttgatatactgagagatgctaagaaatccaaagcattccagtgacagcgaacattgcattgatagaatagggatgtaagaaggctgattaattgccacatttgataaagggttggagaggggatgaagggggaagaacgtgtgtgtgtgcatgcacgctaaggagtaccacgatagtttgtgtgtttcttccattgttttcagccctggataaagagggcccacctgtctccaaatccctggtagcaggcagagctcagtacagtaggctatattgggtatagggcatctatgaggcaaagaccatatctcactcacatccgggtcttgaggtcctgacattgagagtgtgccctggaaagagcaccgaaggttagtgagggcagctgcgtctgagcactggtgctgatgctggtgggatggactacagagtctgtccccactacctttggaagagctacccaattaaaactgagttggtggaggtattcccactgtgtctcccacaccttctctcgagggttcagatatgtcgcgttctgacttcccagcagcctgcatcatgcctcttgtctccagcacttccctcactgtgttcttgctctactgagtactctcagctgtgtggttgctttaggacccaagcggtgctgttccctcccctaggaagatgtgctcttctgggatttgggagcattcatgacatcgttctctgtaccaccctacaagcatccctttccctaccaggtttgtaatatagtcaacttttagggagggggacatgtgttcatttattgttttattaattattaagtgcccttgctgtgttgggaatagacaaggaatttgccgaaactataatccataaccacccagatttctattagaccttcatgttcatttacagataggacttaattttcttaatcagttaccaattgttgggtgactggttccctgttaatgtatggttgggtgagtgggccagctgggtatacagaggttcagggtattcaatgcagaaaggacctgaagatccatggaggtcatgtggtccaactttctgccttcagaggaggagtgtgtgtggggtgcacatctgagaaaatttacagactaggctggggtggggataaaggagagtcttatctgtaggtctgctgctttgggtttctttagattagcttagaagctggaaactggccaacgaaatgcacagaattgctggaattctggagaagagtttgcaccttactctgtactttctaattaaaagggggacccctcagaggtgattccgattctggactcccactggtgtagtgtggcaggttgagtttgccgccccgggcacatcccctcatggtcagagggatgaagaggagggggtgaatgtcaggttccagaaaagcctgctctaaagtcatttcctggtcatgctgatctggaaatagctgagaactgtgattgagacccaagttttgcccccaaagctagctttatatatggttgtagcagtcaggacctaccagatggaggggacctgtgggatagggataacaggtgccgtgtgcattggcacacaggagggcaagaggggagagagggaaaggctgcgaggggaaatggagagagaaaggaggctcttaggaaaatccctggaggagggaagacttctaacctgagccgaggccctgagccagttcctctgattttttttttaaagtcaaacatggataaagtcacactcaggtgtcactgtgaggggaaaggtggagaaaagtgactgtggtttcagtttcagctttagccaccatcttggcttatgatgttagatcagttcttgcctctctctgagcctcaatttacctatctatattttattagttgaggaatcctgaattgtaacatgaaatggttgtatgtttccaatctctgcttttacctgtgccttgttggatctccctctccccttcctagatgacctcttgggcagacttcccattttcagttaacgaaacgtcagtgttttcatctgatttaagactccttcttgctcctgccttgccactgtagtaagggggcgtgggctgctctccctacctctcagctctgactcctccattagtgagaaggaggcagagggataggagcaagtacctttatgcttaactgggcacaagagatgttttcttcctggttggtttttgcagcttctctagctgaaactggccaggcagcagcacccttggtctgacaggcatctacgtgcagattcctgctgaaattctgtggagacctctccacctcacaggtcccaatagggatttgtggctctggttcagccactctgatccctgctgcacagcctctggttgctagagtaaccttgcatggtggccagttcccctgggtgagatcccagagagagctcaagcctagccaccctgtggggcccacttaacttgcaggaagctcatgggtctctgccaggtcaaaaggtagcatggcgactgtcctagcacaggcgagcggagcagcggttcaggactgtagccaaagctgagagttccctggggtctgaggtgctagtttatccatcttgcaaacgtgattgtcttgatgattctcttaagtccccgtttcttagatctaggaaggggacctccctctagctgttatcctcttccacaaggctgccaacatgctgatgctgtgttccctctcaagcctcactagcctgtggctgtggatgggtggggggtgggggatggtggaaaagggatggttgattataaagggctggcttagtgagccctgggctggggagatgtctagttccatctgttggtttcttagaaaatgaggtattcaggccgggtgtggtgactcatgtctgtaatcccagcactttgggaggccgaggtgggcagatcacctgaggtcaggagttcgagaccagcctggccaacatggtgaaaccccatctctactaaaaatacaaaaattagcccagtgtggtggtaggcatctgtaatcccagctactcaggaggcagaggctgaggtaggagaatcgcttgaacctgggaggcggaggttgtggtggccctgagatcacaccattgcattccagcctgggtgacagagcgagactccatctcaaaaaaaataaataaataaaataaaataaaatgaggtattcagttcttgttttcagcagggagccctgtcttctctaatacctgggtaacaggaagcagtcacccaactctcctttatgtacagaatgaagaattttatcataacccacactactataccttagatacacacataagcacaagtgtcagatgcagaccctgtgccttttatttgtgttgtctttctgtgcttttgctgttctctctgtggttatttgtcaaagtatgagggtaacttcttgtggaaggacagatgttaagtattctttaaggccattgtaagctccccatcttccaaaccttagagagtcaacacacactgttctgagtctgctgtgtgcttacatcagtgctgacagaccaaattatagtactccctaacccaattctaaaggatgaatgccatggcacttaaagtattttgcagaaactattattttaacttattttcacagtggctatgggttttttatagtcttgtaggaactttggttaaatacagagtaaaaactgaagctgctatgggaataatgagggatcaggtccttcaaggtcttaaaaaaaatctctaagtagcagtttcttttgtgcctgcaattctgaattgcagtgtgtccctccagacaaagctgagcgccatatgtgactgtgcctgtttgtgttttcgaaagcctcagcggtcactgccatttcagtgcctgcaagtcttgacaggaagcagtggtaaaagactgtcagaacctgtttgtaaaaatgtttgtgtttgcaaagatttttgctagtattccatgcatatcttagctattaagcaaaaatattataccattcatcttagaagaaggaacaaggctaggtaatcactagcattctcttttctttttctggcagagaactgaaagccaagagcattctatctcatgagcactacaggtctagggcaggggtgagcaaaccttttctgtaaagaattgaatagtaaatattctaggctttgtgggccgtgtggtttctgtcacggctactcaggtctgctgccacagagcaaaagcagccttagacaagaaaacaaacgagcgtggttgtgtggcagtaaagctttatttacgaaaacctggctggtggaccagaggccataatttgccaacccctggtttagtgaaaagaacaagtttcgagttgtcaccgatggttgaatttagcccaagatggtagctttgcttgtctgattaccttcatgccaacccacattttctctggctgacactaaccaggacagaagcctaggctggtcttccattttctcttaagaaagtgatcagtttatgggattgtatgcactttacctcacccacagcagatgttcaggaactgagtatccaacataggataaaatacagaatgaaagcatcctttaacattgagatgaggttgtggtgaaggggaggagttagcagtctgtcactggggtgactttctggggagctctaatcagtcatgtgtttctgctagcagcagcatcccctcctcattcctcatgtggcatacattgcaggtcttcctggcgcagatgctttctttgctcacacacattccctcccttctttcgtttttctccccccagcacacaatgctgctgctgccacacaccatttcaccccatgctggcccacaaagaagacagaggttgatgacatagcatgcaacttcagaaagttcaccactttgagccccgatgtataaatggtagcagttggtactaactctgccagtgcgttcaaaagtcatcataaggacaatgtgatatttatttaaatacatattgcattgctgactgacagtgtatttgcagtcattatccatttctagagacaagttcatggcaagcatggtaaaaagctggacctcaggagggaactgaggacaaagtaagccctgatgactctcactggcctcctgctgcacctgtccttatatttgacctgttaggttggttactttaaaaagccagttacggggaggctcatttaaaaagacataacacctgtgaaagattattttaacgtggaatatatgactggacaattatttgccaatctgatgaagtagggccacaggttttgttttcattattctgtatctactgatcagcatatccacttgcttgcacaggctacacctataatgtccacaacttccagttgcctcttatgtaacaatagaacaagaacataaagatacagaggaaagctgagagcaattctaaatgtctatggttttttctttatctcttgttgttatacatccatatctgattcaacaataaaacatgtaacattgcttatccagtacttccaatggattcagcctggtgttttggaagaaacaactctttcttttgcactcgtatctcattatttgagacagtacttaattaatttaggtagttactaatccaactgacataaacttgggaaccaaccaccaactcctgataagcaaacagctcaactcttggggaacaaaaacgtgtaagctctttagaaattaacaagtcatgagagttcagtatggcttgggcgttagtcattaccttttagccagagggaacaaagaatgccagttcaaatgacaagttggttaaaaggaaatctgacagcttctagagtgttggaaaagaggtcaagacctgagcttctaccctcaatggctcaaacaggcataccttggagatatggttggtttggttccagactaccacaataaagcaaatatttgcagtaaagtgagtcacacaaatgtttttgtttcccggtgcatatgaaagttatgtctatactatactgtagtctgttaagtgtccaatagcattatgtctaaaaaatgcacataccttaattaaaaatactttattactaaaaatgctaatgatcatctgagccttcagcaggtcataatctttttggtggtgaggggctttgccttgatgttgatggctgctgaccgatcacagtagtggttgccgaagaaggctggggtggccgtggcaatttcttaaaacaaggaagtttgccacatgatagattcttcctttcatgaaagatttctctgtagcatgggatgctgtttgaccgcattttacccacagtagaacttctctcaaaattggagtcaatcctctcaaaccctgccactgctttatcaactatgtttatgtgatattctaaaccctctgtttcatttcaacagtgttcaccaggagtagattccatatcaggaaaccactttctttgctcatccataagaagcaacccctcatttattcaagttttatcttgagattgcagcaattcagttctaccttcaatcttcacttctaatacttattctttgctatttccaccatgtctacagttgcttcctctactgaggtcttgaacccctcaaagtcatccatgagggttggaatcaacttcttccaaactcctgttaatgttgaaatgttgactttctttaatgaatcacaaatgttcttaatgacatccagaatggtgaattcctcccagaggttttcaatttactttgcccagatctgtaagaggaattgctatctatgggagctggagacttatgaaatatatttattaaatcataaggcttttcagagtcaaaattactctttgattcatgggctgcagaatggatattagcaggcatgaaaaccttcatctccttgtgcatctccatcagatcaggtgcattgttagtgagcagtaatattttgaaaggagcttttttctgagcagtaggtctcaacagtgggcttgaaatattcagtcagctgtgctataaacagatgtgctgtcactcaggctttgttttccatttatagagcatagagtagattgagcatcattcttaagggccctgggattttcagaatgataaaggagcattggcttcaacttagtcaccagctgcattagcccctaacaagagagtcagcctgtcctttgaagctttgaagccaggcattcccctctctagctagaaaaatcgtcgatgggatctccttacaatagaaggctgttttgtctacatgaaaatctgtttagtgtcaccaccttcatcagtgatcttagatcgtctggagaacttgctgcagcatcctcatcagcacttactgcttcaccttgtacttttatgttatggagatggctgcttttcttaaaacttatgaactaagccctgctagcttccaactttctctgcagcttcttcagcctttatagaatttaagagagttagggccttgctctggattagactttggcacaagagaatgggctggtttgatcttctgtccagacccttaaaacattttctgtatcagcaataagggtgtttcactttcttatcatcatttgttcattggagtaacacttctaatttccttcaagaacttttgctttgcattcacaacttggctaatggtttggtacgaaaggcctggctttcagcctgtctctgctttgaacatgcctccctcactaagcttaatcatttctagcttgtgatttaaagtgagacatatgagtcttcctttcacttgaatactgagaggctgttgtagggttattaattggtctaatttcaatgttattgcgtctcagggaatatggaagcccaaggacagagagagagagatggagaacagctggttggtggagcagtcagaacacacacatttatcaattttgttcacagtcttctatgggcgcagtttgtgatgtctccaaacaattacaatagtaacatcgaggataagtgatcatagatcaccgtaccagatacgataaaaatgaaacagtttgaaatatcacaagaattaccaaaatgtgacacagagacacaaagtgagcacttaactgctggaaaaatggtaccaatagacccgcttgttgcagcattgccacggatgttcagtttacaaaaaattgcattgtctgtgaagctcaataaagtgtgaagtacaataaaatgagatattcctgtataataataactattgtgtgcatactatgtgctgaccattgcacattatctcatgtactccttttaaccgtgctttcactgattagaaaaccaaggcaagggctgggtgtggtggctcacgcctgtgatcccaacactttgggaggctaaggtgggcagattgctttgagctcaggagttcaagaccagcctaggcaatgtggcgtaaccacatttcttaaaaaaatattagcctgtgtggtggcatgtacttacggtcccggctgctcgggaggcggaggttgtaatgagctgagattgcaccattacactccaccctggggaacagagactctgtcttaaaaaacaaaaacaaaaacaaaaaggctgagttagagaagagcaaagtgcttgcccaaggttatatagcttagaccgagtggggattttgaactcagactgcttgactccatatttactgtgctctccagcttagggcaaactggtagccgggaagtcatccagctcgatttcagcttgcctcctcctgatttcctggatgtctggtttttaaaaagttaatagcaaactagtatagtgttggctccacagacgtgcttttcagaacccacctatttgccctttactggtaatcaggggtaatcctgtcccatatctgtaccctgatatgtctgggttgtaaaaagtgtaagactggatggtacagttaagctatttgttctggatttgggttttttaagtttggcatttgagcagaatcacaagttgtagaaagtagtaatttccagacatttgagatctgattcaccaacattactgtaattaaagaaaaacctatatttgtttgctccattttgtctcactaggatgttttataaataataaacctagacatttagaaaatagcatctattcagctggttaagctttcgtggcccttcatgttcagatgtctcaaggtgatatgagtgtgcctcaatttatagggagtgactatggacggtgaactatattgacatataaaggcagctttaaaatacagactacagaaatcaagtggcttgacaattcccttagaacatatgtttatgaagtatagagctcaaatgtaatgatttcagttggttacagagtattaatgaattttgaattgaggcaattgtgatcaagcttgttgccttttctaacatgaatcattattaaaatgatgattgtcctccatagttatgaaagcattaaaaaagcatctacctatgcctgaattaacgggacagatgtggttttcagctttcacctggccaacaggacttccatggttgtgatttcaaggtgcttgtttatgtatatggttttgctggtattttctgagtcttcaataccatttcttgtaatagggtgtgaatgggtgtgtgtgtgcttgctagtatgtccccttggtccttagcattgtgggaatgtaaagtgaagctgagtaggatgtctcaatgtcctagaatcctccagcctttggtttttaagaggtacccctgtgcgagagctcgtggaggcccttctgtgtaacattcacaacacaaccaccacattcagtgacagcaggtgctgagtgcaaaccgtgtgccaggcatttcccaccatcagtatcaatcctcaattccagaaagttggtactgttgtgaccattgagaggatgaggagaccgttgcttggagactttcagtgccttgcctagggccacacgatggaaaagagcagaaccaggaattggactgctcttcaccatcctcatggctgcctggagggcaggcagtcttgggcttccttaaaagatttttgttttgggagggctcttcactgtctcaagaaagctgagggaagaattcgtctcatttagtggatgaggatacaaaaacatatgttaaaaattacagcctcgggctctgtggaccctgttcaggtgccagagggcttttctcctatattgagcacctttgccacaaagaagctagaggaggaaccctcccccgatttcaccttgtgagttacaggtgtctgacagccctgttcttagctaagaagtgtgtgtgcacctgactgcaaacagccgccatgcctgctggaggacacatgtgacacacagtttctggggaccctcctgggcctacagactgcagtctcgggtgggtacccatggcccaggacttcacattcctcacactgccctgccctgcttctcttctgtctgacctgatgccccaggcttagggtggggaggggatgctggtgggtgggttgtcattttcctgtcccagtcaggtattttgtattgtttctcaatgagccatttcccatctggatttgggggggatcagggaagatgggtgggttatgagttagtttgctgggcatcttcccttttttctctgtccagctcccaggtgtttgaggctttttcctgcctccaggtgctccaaatgtgggggctgccctttctctatctgggtttcagcctctccagctcctgcaagacagtgctgttggatctctgtagtgcctcttggtttggccactctgggatttgtgagtcatagtcttcagtttggtgctttttcctactccatcctgccttctgctattcatgccccattgcaagaacaggcattcttccttcccgtataaacttgcaacctggttccacccattctcctctcttcttctccagatagtcgtagagatcgctgcctcccaaaatagccccatttgattccttaggacaggcaggaaactcgctgcccgaccctgcctgagtctccgtttccttagctggagagactgtccttgctctagaaaccaaccaccggaaattcacctccatccctatcacttcctggggtagttctttctgaccattgggtttgcttcttgggtgtctggctctgcatacagttagaagctctttaaataccttttaacttcagggtttttgtggatgtgtatatggtggagggagagagtgtataccagtgagcatgagagcaagagttactatttatcacaactggtgtccaggggtggctaaagattatcgacttctagagttgtgtttttcaactttttttttaaatcttagtgagcagtaataaatacattgtaactctcaagcacacataaatgtcatctgaaacacgtttgaaaaatatatgcgatttatttgttttttgagatggagtcttgtgctgtcacccagggtgcagtgcagtggtgcaatctcggctcactgcaaccacggcctcctgggttcaaacaattctcctgcctcagcctcctgagtagttgggactacaggtgtgcgccaccacgcccggctaatttttttgtatttttagtagagaaggggtttcaccctgttggccaagctggtctcaaactcctgacctcaagcagtccggcctgccttggcccccacgaagtgctgggattacaggcattagccactgcgcctggccgaaaactatatactcttatattctgatatttcctgtgcaatgtgatattttccatacaattttatttcatttttcaaaaattgctggatacaaagcactgaattaatttcatatgtattttatttaaacaatcctctctcctccattacagtatacatttcatggagacaggaattccatgttattctacttcctataattgatgcttaatacctattgtcaactgattcttttctctgtgcagatcctctggagaaatattttgttctgtgccaagaaacagtttcattcaacggttaaggtgacttgtgtcactgatctgatttccttcttttacattaactatcaaaaatctcagacttattaataaagacatgtcttcacaggatacatctttacaatggtcttatttttattttattttcctcgctctttttttttcattttaccttattcttctgtcctaaatatttaaagtttcagctgattttaaagtaaaagatgctcaatgggaaaagctcacacaaatcagagctacctaaaagtagagttggaaagtcccaaggatctttttctctgaggcaagcctctttgcttctgggtgcttgccctgcagactggcttatgaagaggtcaccatcttttcagattccaggggcctgtaatgttcataccactgcagtattcgtattacacactgtaataatctggaataataagatcgtaggcactctttcttgccctcacatgtggatctgccttctccttttaaacagccatgtaacgttccctttctcacctactttgaatttttatattcttgctgctctaaggttttttttttggagcaaggaaagcaatttaaaacataaaatttactttcaaaagaagagtagagataattaaccagcccttgccacctaactcaatataatcccctagtaactcctcttggagccaccaggttccctgggagtggaattgcctgtggaaaggcctgtgtgggttctgagcttgggaaatggtgacggagccctctctctagcctctgggaggtgtcaaataatggatgagagtgaccttggactggcaagagcaggtcagtgcaagtgacatgggtttcttagatactcctcagctcagtgtgggtctcccgagactcagttctgcctgctgacttgctcattcatttccattgcagggctgcagttgggtcatgcctggttttttggcctcccaatgtctcttaattaacttaatattacttggtaatactaaagcaatgatgaattatgtgcatggagtcattaatcttctgtgtaaatatctcaaacgctgtgtcttaattatagactccatacttaaaatattttaaagcttctattcatatatttacttagaaaggtatgatccgtgtttctatggtgtcggcacactcagtgggaaaatggtgtccatacattggagacgttcgtatgaaagagtagtttctctgatgagatgagtgctgcctgttctccactgacccacagacattcttagccttagcaatgaagggagttggggtaagattgggcctggggatctgggccctctttcaccttctgactgttctgtctatagcaaaccatagagagtttttctggacagtccaggaaggtgtaagagcagctttagatgaggcagctgtctccctcatagcagagccagccctaagccagggcagggcctcctccgggaagaattgtgcacctccttcagggtcatcagtgagttaggtacattgtgagtatactaacttagtatttagcagttactctgcaccgggcaccatgctgttcctgggtggtggctggtggctggggcagggcagtgagtgttacatagactagacacagcagtaatagccaatgttccatgagaacttgccatggggtttgccacacgaagacactggctcttgtttacataggctgcctcatttgcacttaccaacaaacctgggtagcttctggtgtctgtattctcattttacagtgaagaagctgcagtgaggaggggtaaagtcacttgcccaagtctgcatagctaataagtggcagagccagaacctgagcccactgtccaaggtgaaggtgcttcctagcatggtggccacctctaggtaggagctcagctgtgccacccactgggacagatacactcccaacagctgtgattgggtagggtggctccacctcccagatgggtcctcggtttgctgagtgttggttggataacttgactaactttctcagcagtcctttgagcagctgaggtcatacttagatgtgacttacgtgagacaacagaggagtccaggtgagagctggcaggcatgggaccagggtggagttgtagttttccccaccaggtgggtggagccaggtctcttcaaaccagagggcacaattgctgtttgtattgttcacgttgactgtagcaaaaataactcagtgcctgtgaacctcatctgtgaaatgtaaataaccccttctctgcctatttgttttttgagacggagtcttgctctgttgtgtaggccagagttcaagaccagcctgaccaacatggtgaaaccctgtctctactaaaaatacaaaaattctccacctatcttactctgtagcttgggaaatcaccgagataagaggttggaaagtgataactgtccaggcatgcaagtagtatgtttataggaacatgactgagcaacagggaaatgagatttctctctctctctctttttttttttttggagatggagtctcgctctgtcaaccaggctagagtgcagtggcacaatctcggctcactgcaacttccgcctcctgggttcaagtgattctcctgtgtcagcctcctgagtagatgggactacaggtgcatgccaccatgcccagctaattttttgtatttttagtagagatggggtttcaccatgttagctaggatggcctccatctcctgacctcatgatccacccacctcagcctcccaaagtgctgggattacaggtgtgagccaccgcgcccggctgagatttcatttttaactcagacgtcaatcaacgtagccatatacagatttgaaaagcttttctttatctctgttaatggagaaaaagaatgactgctttcttgtcaaaatgaaagtgttcagttttaaacttaaccagttcctgccattttgaaatgttcactcatttcttactttttttttttttttttttttgacacagagtctcgctctcacccaggttggagtgcagcagtgctatctcggctcactgcaacctctgcctcccgggttcaaacaattctcatgcctcagcctcccaagtagctgggattacagactcgtgccaccatactcagctaatttttgtatttttagtagagataggtttcaccgtgtttggccaggctggtcttgaactcatgatctcaggtgatccacctgcttcggcctcccaaagtgctgggtttacagccgtgagccactgtgcccagccaccatttcttactttttggcaaaggaagtagacatattggagggttgacctgaactccatagattcccagggagacagtgtatgactttgatcagcccatgtagggcacattcccattgccatccaattttacctgagccattgggatgggatgcaaaggcctgacatggtttagaaataaagcataactctgcagtgccaactaggatggggtaaatgggattctggcctgggtgacaactaagacaagattgctggcccaggtgctgagaaatgtagcccgagataatggttctgtttctccttttgtgtagagatgggatcttggaatctagtgaggtgaagtacccagctctctgctttggtactgtgaggggattctgcagaggtagatggaatatggtttttgtcctcaaggcactgacaagctgcaaatgatacgagacagtgtatcaataggttcaccttcccaacccttctctgctcttgtacttggttggtgctcaattgtttgttgatatgatttaccttcatgatgacatgtcaaaacatgtgatataatttttagctctggatggcaaacagtttcaacttggatgccaactctacccagtgggtgctgcctgaatggcaaaacatgtgacactgcctcagggtgccaggagaaagagtgccgtctgatgaccagtgggaatgtctgttatggccgggggatgggggttagaagcagcaggcatgtggtggtcattggttcatcctaagtacattaggctttcaaaaggggaaaaatgatgctcagaggaaatgaaactccttagtcttcccttaaagggtgaagcaggatttagacaaacaggagtgctttcagtcttggaaaagagcagacgtgaagaccgtaccttccagtgagtatgcagatatgtgggaggctgtgggagctgagggactggaggcacgtggaggaggaaggggcatcaggaggggcaggggcactgtcctcgctggacccatgacagacgtcagttggttgttggtaggttgagtgtagacagattgcagaggtcctcggggatgccagatggaggaatttagatgtgatgcagtcctgtgcttctcaagaagccttcccagatgctccggacacgattagctgctccatcctctccgccccaaaggagactcctagtactctgcttgagcttggattcttgtctgctgtcctgaaatgtttatatattatctgccatcctccttgaggatatgaacagtgttgtagccatctttgaatccccagtgctcaggatcatgcctggtatggagcagataaccagtgagtggtgttgaattgagctgaaatagggtccctgaactgccaggcgagatgggatggaagtgggcagtgccttagaggtgaagctgggtgcggaagtgggaggctgccaagcatagaatgtaccctctgccaagggagctcagagtccatgtccctgggatgcacgggatgggaaggaaggcaagtctgaagcgtcaagtttacaagagtgtgcacagcacaggaaaccagttgaaattgaagatggcaacagagaacggaaaagattgaaggagggaatttggaaagctgagcctagatgaattcccagaggcagtgacttatagggctcggaggccctgtgtatagggaaccaccgctgaacctgtgggtcagagggagtcatcaaagatgttgtctcttgagaaatgaggagctactgaagattctctctctcagatacctcaacattttagagacatggagtgatcctacagcccattgtattaatatttaggtgggactccttcatttgcaggtgacaaaaactgaacccaaactagcttaatttggtggcttttataactgaaaagcccaaatggggaggggaggggagagaagggaatttttgacttcaggctcaacttgatccagggatgcatacagtggcctcagggccaggtgcctgcttctgagtttcgctggctggctggctgactggcacactttctcttcattttttggcttggcttcccttggtgggtgttagctcttcatctctatgtccccctggcaactctaggcttgtggtctctcagggctgaatccagccaacaaaagaacttcttacctagttaccccagggaaagctcccagacttgctctcttcggacccggttggtgtgggttggagcttatgcctatccccgaaccaataaccttggctgcatgccaactcttattgcccctgggatgagagcaggaatggagcagttcctgggggaaggtcagggtgctgttacccttggagttttgctgggtggcaaggccatcattactgccccatccaggctaactgttgtagtcttggcagcaaagcagaagctgcctttgctctgccggtgaggaggagagctccctgccagcctctgccgccccaggcatgctgctgccctcttcccacagaccgcatgtccttgaagctgggctccgtagagtggtccaccaggtcaccctgctggccacctccatttgtcatccctgggcacattctagacagcatcttgggccggggccttgccccacctgggtgattgtggggtcactgaactgtcgtgggatctcaggagaaacctcttcagagagtctgcatccacagggagaagtgtattcacacttcccacaggctggggagctgtctcacctatccttagtcagggcgagccttccattgtgaggtgctttatagtttgcacagctctatccaacttgttacttaatctggcttttaccataacactggtgggcaaggcaaagcaagaatgattgtccctgttttatggatgaaagaactgggaatcaggaggggtaaatgtctcaaacggggcaacacagctgtcgagactagcattagacttgggggacacaaatgtcacataaaatgtgtacttttaaaccgaaggtgaagaaagatgagggcaaacagactactgtagccagtttcttcatgtaaatgtggtgttaaattacccattgttgttcctctaagtgcatacttcattaatacctgcaggggaaaaaatgacctctatttacagccaagcatctctgagccgacgcctgcctgcccaccagcctcctgtggtttacccaccaaaattttactagaggttgaatcggcttgtagaagctgtgtgatagcgctgcggctcccctgggtcacctcctgaaacgtgtagggtcgtgagtgggagggtgtctcagcaagcccagcctgaatgtgcacgatggcctcaatcgacccagccacttgaaaaagcagccgctgctctcggttcttgctgttcttgcttggtcagctcttccctggggtctctgcgccctcacagagcctccctgtgaagcctgtccttggagactttgctcaccaggtcatagacaattgttgttttccaactggaagagatcatctgatttagtctgttcatttcacacatgagaaacgaagaccaaaccccgtaccgtggcacctggggccctttgtgtctgccctccactgtgtccctgcagcctgtcccttcccttcccacctgtcctcataccttgtgcttcagccatgtggactgctcttcgccctgaacagcttgccttcgtgcgggctcctcttctggatggaacaccctgcctggagcagggagggccatgatgagggagcaggtggctgtgctgagcctttccctgacatgcactcatggatgttttcctggaacagagcaaaaccagggggcgctggtatcatagaacttcttagtgggaagggacatttaataatagttggtcaaaacctctcattttgcccatttatttattcatttataaatgcggaatatctatttttgtgacaggccttgggaatgcaatgatgcatgaaatagaaatgatctctggctttaaaggaatgataatttattaggggagacaaatattaaagaggcaatttttaaaaattgacaaatagctacataattagggtgtacaacatgatgttttgatatatgcatacactgcggaatggctaaattaaactaattaacatatctattacctcacatgcttatttttttgtggtgagaaaatttaaaatgcagtcttagcaattttcaagtatgcaatacattgttgtaactatagccactatgttgtacaatagatctcctgaacttactctttctagcttttgtatactttgaaattttttatatgttgatcaacatctccccaatcttcctgacccccacctctggtaatcatcattcttctctctgcttctgtgcgttcagtgtttttagactcctcatataagtgagatcatgcagtatttgcctttctgtgcctggcttatttagcttagcatagtgtcctctaggttcacccatgttattgcaaatgacaggatttccttctttttaaaggctaaatagtatttcattgtgtatctataccacattttctttacccattcatccattgatgaacatggaggttaattccatgtcttagctattgtgaataatgttatgaagaacatgggcgtggcagacatttctttgacatactgatttcatttcctttgtatatacattcccagaagtgggatcactgcattatatggtagttccactcttaattttttgaggaccctctgtaactgttttccatagtggcagtactaatttacactcctatcaacagtgtacaaagcttccctcttctccatatctttgccaacacttatcacttgtctttttgacaatagccattccaatgaatgtgaggtgatggctcattgtggttttaatttatatttccttgatgattagtgatgttgagcactttttcatgtatcttttggctatttgtatgtcttcttttgagaaatgtccgttcaggtcctttgcccattttaaagtcagattgttttcttgctattgagttgtttgagttccttatctatttttgatattaaccctttatcagatgaatggtttaaaaatattttctcccatttcataggttgtctctttattctggtggttttccctttgttgtgtgtaagcgttttagttagatgccatcccatatgtttattttggcttatgttgcctgtgcttacagactcatatctcaaaaatctttgccctgtctaatgtcaagaagcttttactctgtttttctgtagtactttcactgttttaggtcttaatgtttaagtctttgatccattttgagctgatttttgtatatggggtgagagaagggtctgatttcattcctctgcatgtggatgtccagttttaccgtaccccttattgaagagactgtcctttccccactctgtattcttggcacctctgtcaaagatcagttgaccataaatgcctggatttatttcttggctttctgttaaagaggtaattttttaaaatttaaatttctattgtgaattacggctgtggaaaagtataatgggctttgacagcatgtaacagcaggctctaattttgtctgggaggtcagtaaaggttttgctgagaaagtgtcatttaagctgagccttgaagggcaagcagagtgtagtctgatgagaaagagggttggggagactgttttagaaagaagggaacaggatgtggaatggttccactgtggcccagggccacagcatgaatcagtggctgagttgggactagcagaaatcagatctatggctccaagccctgtgttccttgcattcaaccccgctgggtgcgtttttggccctgtatcacagagctctatgcttattcatctaaagagggaagttcatgtccatggggcaggcacccttggtggataaagcagggacggcaaagacatggaggtgggaaggtggctggcatgtgtgggagggagcaggttggcccatgacttggagtgaagcactctgacagaggagaggtgggaaagttggaagaggaatctaggcaaggatgaaaggatgagatccttaaccaagaagctgcaggttgggatagcaggggaggccaggtgagatattgagatcagctgttgtcctagcagtttgactctttatttcaggcttgttctaaaaagggtttatggtaacttagatacatacatatgtatcctgttttttgtttttgttttttaaatacatatgctaggatcataaaacctcatgctgtaatagcctctacatgtctagatctatagctttattcctttcggtttttttcttctctgctttctagtagcacctatgagtgccttacatatgtctgatgctacagttaaagacacaaagagagggcccctttcaatagagaatccaggactgcagggcacagaaggaatggaaggtgtcagtgggagagggggacttctggcagagtataagccagaaagccttcccaaagccttggggcacatgggtggaagagcaaaacagagaagtgactcttacctggctgcatcaagcctctgttcaccttttgacagcagcttgggagctctgtgaggacagggttctggctttgctgagaaggatgcaggtgctcggggatagatggatagacagatggacaagtattcatgccacagcactaataagaggattcttaaaataggaaaggaaagtaccaagtctaatgaaggattttggcatctcccacctcctgctagttgacagtttctgtttctcaagattctgtacagcattaactggtttggagattattaactagtttagagactactgatttagagcctctcctgttggtgaaatttcactgtttaaagaagacacatcaggttttagaattagatttcagcctttgtttctctagtggcttgagttctcgtgggcggggtagggggagggagtggggggacatccgtccatatacagggtagtttctggacgttgttttctaaaggaaggtttgactggccctgcctactcaggatctcctgccagggagaagaaatccctgctggtgggtgactgagtgccacaggtgtgactctgcctggcacacagagggggatgagatgcaagaatcatttactctttccctgtacctggggaagggctgttaaggtacagctcctgctcaggccttttataccagggacgcctcatttcatgtatggttctagagggttcctgctggccccttcttctgccatcccagtctttcatccttgacagtgcttcttcctctgtgcttccatcagtcgtggccacagacctcagtgtcctctatgtgtcacctctcacctagctgttttggctgggcccacagtcccaccttgcctgttaggaacctgactttcttgttggcttccttttcaaattgttaattcaacattcttttctcaaatgaacaatccttttgtaaggcgaataattatcccacttctcctgaacgacgttttgcaagatttaaaaataatacttcatttgttgaatgtggagggatacctgtttcataggattcctttttagtggcaggattgaggaccgggatgacattggcttctagacaaactggtctgcctgctctccaggctgtgattgttcagttggcatcatggtagaatctctgtaataaagaattgcattaaaggaagtttgtatttcttatgaagaatcccatcaaataattcactaaggattttggaaagagaaaccaaattctttaaaaagcagggagagggcaaaggagaaggaaaaagaacgttaaacagttcatttatactaatggcccttgtgttattgtggcaaaatttcttctaaataaaagtcagagaggaaaaacaagctttgtttgggaggtgtactgtctgttctctgccttgtttttctgctctgaagtatagtgtgctgtcttgacgtaggtatgtaactgctatgaatattgatggcagcaaaagcttttttttttctctctggcctagtaaataaagcagcaaggataaaaagggatgaattgtaaaatcagtgtgctgtttttagcttctctggttcccttagaactcttaagtctcaaacatattgacaatctgcctttggtggtcagggtctgatgtgagcactgtgggttggcattttcagggatttttgcctctggttgaagtaacagagttcctttttctttgagctttcagagttaatgttatggcttcattgaggccttcctgtatctttccctctatccagtggcaatgctggtccctgctcctcagaataccgcagtggcctgagtgtgtgatcgttcctccagcagccacgcctcgcatgcctcccgagcaagcactcctctgggggatatggcagggaatggggcaacggggaatctggacagtaagcaaggaagggcatcctcgtagctctgagcgtggcatttcatgtagctgtatgaagggcatgggggaagaaggcatgggggcatgggatgagcctggctaagaacaggactggtctgaagtctagagggggcatgagtatagaggttggagatgagctaggctttctaaattaaattataaacacactgatgctggctaactctcaaaacacacacacacacacacacacacacacacacacaattcgttcactagactgttataatggtgttctgaggagcaaagggagctttggagggcaagtgtttagaaatgacaggaaccacaacagccctgtccttggaaggaagccctgttatatgaccagtgaagagtggagaatgggggcaaagactgggatgcatggccatggctgcatggtggtcaagagggaggatacctgtggcacgacaaagggatgttctgcctggcacggccggtgacagaggggaagcgattctggcagcagacagccggagcccaggggcagcacaggcaaggcttccatttaaatgcacaagggtgttggggatactgcaagcaaacatttaataggtgacggttcctcaaagggtcaggcttatgggaatcatcctaaaatttgtgtttttaaaaatgtttctgaatataaagtgttctcttcagaaacataaaatttattttcaaatacacatttgcctattgcataaaaatatataatagtgataatatatagcaaagtgctttttttccccctggaatccgttgtgaaaaggcaggggtggcctgatgggagggctgaagatagagaatcgctcttgtcagttactacttttgtgactcttgagaaattctctgtgtgtacattcaaaacttccccctccacacacctcccccccacaccaacagactaaatgacaggtaccatagtggggacatttttctggctcctggtacagtgcctgtcatttagaagtggtgttcacgtgtttcctgagcctattttattttgacctcttgccctaggcattttaatgagtgaatttcatgacctccatttctctaaggtattggtaacttttcgggtcccactgatattagtataggactctatagttcatattggaaagttacagttgctgatgatactttgttatttaagtagcttcatgccgaggaatgcctcttgcaaagttaattacacacatctctgttggtccatgtttctattgaaactgaagctgtataaagaaaacatttgtaaaagaggaaggagtcaaagtttttagacttgctgattggtatgttttccacagctcatggagttgcatgggttggaactggaaaggttctacgagtcatttagcccgtgagcagcacctgtgaggtctgtggcagtcagatgggcatggctgctgggatggatactagaggaaaggtcagaggctctgcctaggtttcctgggaaagtgcatgatgacctgtcacaagttcagccgggagaggcggcatgccaataagcaggcagggtgtttgccatcctgaatttacttcccttattgtgtggatgcaaaaacttatatccagaggaggagaaggacttgtccaaggttaccttgctactcagtgacaaagctgactgtgacttcgaactcagacataaacccaagaggaagagagggtcaaaacagatgcatcttcattttttccagaggatgaatttcttctgttcaaagacaccattggaatctttgttgtacccttgtgcttttctgggcctgatttggcaacctcaggaggaaagcatgctgcgttttgcaaatgtgtgcaaataacaaacatgcctgttatgtcctaggcagactcatcacacgcattggggcagttggcaaaatgcagtcatgcagcctggaacgaaaagtgttgcacacgtagttgcttatgagaaattcagtgttagaatgtaaatgccttcctggcccaggggcagtgtaattgttccatttctcataatgaaactttgtttggagggaaatgcttatatgtctaaggtgttgattctaatctctgttcctttttctgtctcctcttcctcccctgcccctgcttttttggtatgtttctttgtttttcttcacaggaaaaagtagaatatgccttcctgattatttttacagtcgagacatttttgaagattatagcgtatggattattgctacatcctaatgcttatgttaggaatggatggaatttactggattttgttatagtaatagtagggtaagtctcttttactttggggaaatgttgatttggaaaatgggaggtggaggttggggggggtggtggtaacaaaacagtctttttagggaatgtggttgctcttttatgccagctgttgcaccagaacctctcaggagttcttttaaggctggtgatgctgctgtcagtctctgggcagatactagtttgaaattctctcgttgttactcccgtttttagtaacatgttatagaagggagtctgaactcctaatatgagaggctttacctaacacggtcttggatctccagaaatagaccaaccctgttggtgattagagtcaaatgagtagagcttttaatacttagtgccaatgttaagttaaaaaaagtaaaaagtaataaaaccttcatagcagtaaggtactctgctatttaacatcccttgagcaaagctattaattttcttttttttttttttttttttttgctgacttgcgggagaaactctggcatactactgttccattttaaataatgaaacaagtgtctggataatgtcacgtatctggcataaaatgaaataagctagaaaatgcagagaagcaggtgttccaccaaaatcctgttgcaggaagaagacatcagtagttttagtgaaaggagaatgttaaaataaaaaatagtggcctgtgttattttagtccttccacacctggaaatgttgccaggaagagaaaaatgaatccatgttacaggaatgctgggtctttggaccaaatacccatgtaggaagataagatatatcctttttcccagtcttagttatgctagctgtaaagtgagttgctcctcaaattatgtttctgtaaatagcctctctgttttcatcttcatgacttcagtgaactgccttttgcagttgagcaaggtgatttttcttgtggattatccttttatcatgaatcttttgccttttcattggagactaattctgctgggtattgggagagtggaattggttgtgggccttcctaggtcctttcaacctaggaagttaatatgagatcctaattgcccagtgggacaattagacttgtgggaaacaagttagcttttcaaaccgcccccgccgccaatacattgtcatttaaggcatcattgcaaaagaagtgtaccaaaatgaacaggtagcagatatgtgccgtactttcctgtatttggtggactctgtcgaggaatggcaagccgaagccttgcaggtatgttggttctgggataatctggctgtgcctcttctgccactggactttttgttcagctaggaatggagatgcttagccccatttcttgcgtcaccgtgctatgatcacctcatatttctgcctggagacatttttcacactacagcacagcacaaggacagggaaccaagtggagcatggtggtcttattgagttaaggagacagacaagagtttggggaggcagaataggggaggggagggagctatttagagaaagagcttcataaatatgccttagagtactcttcagttttggctgagggctaagctacgcctacacggagttgtgagtccatgaggccaggaaagaccactactagggaaaagagaaagatcagggagctgtaaaatgaataataaccagggctcacaaaggactggaaggcattcaaattctgactaattagggtggaaagacctcattgaacaccctggactgtcagtagagaccccacagggccactggtagtagtgctaaactggctctagagcaggggctggcaaactgtggccaatgggctaagtcctagcccatctagcctgccacctatttttataaataaagttttattgtaacatggccacactcatttgtttacatagttcagtttgagtagtttaggtctacaaaacctaaaatatttaaatatttactatttggccttttacagaaaaagtttgccaattgctgctctagagtacagagactacctgaaatccttgcttacaatgtttgaaaagaagtctgaaaagaagcaaactaggctgggcatggtggctcatgcctataatcccagcactttgggaggccgaggtgggtggatcacctgaggtcgggagttcaagaccagcatggccaacatggtgaaaccccctgtctactaaaaatgcaaatattatctgggtgtggtggcgcatgcctgtaatcccggctacatgggaggctgaggcaagagaatcgcttgaacctgggaggcaggggttgcagtgagccaaaaccatgccactgcactccaacctgggtgacagagtgagactccatttcaaaaaaaaaagcaaactgatatgctaactgaactgcctgccagaacataactcaacattctttaaaggaagacaacaaaatccagacactgaacatatgaagaaatgtgacccataaccaggaggaaactccgtcagtagaaacagatcctgaaatgacagagatgatggaattagagaaggacttcacaaagctttaaaaactgctgttataaatttatggacttaaagggatacctgattatagtaaggaaagatgggacaatataaaaaaaaacaaatggaactttaagagatgaaaaatatatccaaaatgaaaaattctctggtttggcttaacctcagcttaaacactatagaaggaaaaaatatcagggaatttgaacatatggcaataacatgaagaataatgattgaggagaaaatgaatactgcctctgtggcctgtgggggaataacaagtggtctaacatatatatatatttggagcctcagaaggagaggagagaaagaggagacagaaaaaaaattttgaagaaacagctccagattttccaaatgtgatgaaaaatgaaactcacaagaagctcagcaaagcctgagcaaaataaacatgaaaaaagccacatcaaggcacatcataattgtaatcaaattgttaaaaaccaaagataaggagaaaaccttaaaacagagaaaagaaaatctcagactatttgtcaacaactatgcaagccagaagacaatagagagacatctttaaagtactggggaaaaatgtcaacctaggattctcactcagtaaaatatctttcagagttaaagtcaaaatcaaaattttttcagacattctagagtttcagaattcatgactaatagacctgtacctcaatcagtgttaaagacagttcctcagggctgaaggaaaatgacacgaggtagaaaagtggatctacacagaaagaaatgaagagtaccagaaagtggctctacacaaaaaagaatgaagagtaccagaaagggtaaatacgtgggtacatatacagatatttctcccctcgtttaaaaatttctttaaaggtaattatttaaagcaaaaataataacagtgtattgtggtgtctatagcttctatagaaataaagtacatgacaatggtagcatgaagaataggaacagggaaatagccatatggtcttgtgatgtacttatacagtagttggaatgattaaatattatctgaagatagactgtgatacctttaagatgtatattgtaaaccctagagtatggattggtgagctacaacctgtagaccaaatctagtttgagcctttttttcccccaccattgacaaagtattttatttactgcctactttggcaaataaagcttcattgtaattcagccacattcagtcatgcctatggctatttggtattataatggcaaagttgggtagttgtgacaaaccctatggcctgcagattctaaaatatttactattcggcactttatagaaaatgtttactgacacttgccttagagaagccactaaaaaagaaaatcccaggtctatctaataagcctattgtagagattaaatggaatttaaaaaaaacccctaaatccaaaacaggcaaggaagaagaaaaaaggaacaaaggacaggacaaatagaaaacaaacggcaagttgctagatttaaacctaggtaaatccttattaaaatcattatcatgaagaaaggataatggcctttctttgtgtccatgtgttctcatcatttagctcctacttataagtgagaacgtgtggtatttggttttttgttcctgcgttagtttgctaaggataatggcctccagctccatccacgtgcccacaaaagaaatgatcttgtccttttttatgactgcatagtattccttggtgtatgtgtatcacattttctttatccaatctgtattgatgggcatgtaggttgattccatgtctttgctattgtgaatagtgccacagtgaacattaacatgcatgtgtctttatggtagaatggtttatttttctctgggtgtgtacccagtaatgggatttctgggtcaagtggtagttctgttgttagctctttgaggaattgatacactgctttccacaatggatgaactagttcacactcccaccaacagtgtataagcattcccttttctctgcaacctcgtcagcatctgttattttttgactttttaagagtagccattttaactggtgtgaaatggtatctcgtggttttgatttgcacttctctaacgatcagtaatatgaactttttaaaatatgcttcttgaccacatgtatgtcttttgaatagtatctcttcatgtcctttgctgactttttaatgggatttttctttttttcttgagaagttgtttgagttccttatagatgttggatattagacctttgtctctcattctgtaggttgtctttttaccctgtttcttttgttgtgcagaagctcttaagtttaattaggcccatatgtcaggttttgcttttgttgtgattgcttttggcatcttagtcatgaaatccttgctcattcctatgtccagaatggtattgcctaggttgtcttccagggttttttatagttttgggttttacatttaagtctttaatccatcttgagttgatttttgtatatagtataagaaaagggtccagtttcaatcttgtgcatatggcttgccagttatcccagcatggtttattgaatagggagtcctttccccattgcttgtttttgtcacctttgtcgaagatcagatggtcgtaggtgtgtggccttatttctgggctctctgctatgttctgttggtctgtgtgtctgtttttgtatgagcaccatgctgttttggttactgcagccctgtattataatttgaagtcaagtagtgtgacacttccagctttgttgttttgcttaggattgccttggccatccaggctccttttttgttccatatgaattaaaaaaattttttttctagttatgtgaagaatgtcattggtggtttgataggaataacattgaatctgtaaattgctttgggcagtatggctaattaattgatattgagtcttcctatttgtgagcatggtatgtttttccatttgtttgtgtcatgtctgatttctttgagcagtgtaaaaccatgaaatttatagtagaaaatattggataaaatctttatgacctcagtgtagccagagatgtctcgggacacaaaaagctccagccatgaaacagtaattgaaaatgttgactttatcaaaatttaaaacttttcttcaaaagacagtgtgaagacaatgaaaaagcaaggcacagattgtgaaaaatattcacaatacatacacttgtattcagaatatataaagaactcttacaacccaatagtaagaagacaacccaataaacaaataggtaaaagatttgaacagatcttcacaaaagaagatatgtgaatcatcaacaaacatctgaaaagatgctcaacattgttagtaattagagaaatgcaaattaaaactacagtgacagtactgcatacccactagtattactaaatgtaaaaagactgaacataccaagtcttaaccaaaatatggaacaactggaactctcatacaccacttgtagaaatggaaaatggtataatcactttggaaaaaatgcgcccatttcttacagtgttaaacatagacttaccatatgaccatattaccagttctactcttaggtgtttatccaagaaaaatgaaaacacatgtccccaaaaaaactttattcataatagagaaaaactggaagcaacccatatatccctcaacgggcgaatggataaactcattgtgatgtatttgtgtaatgggatattacagaacaacaaaaagaaatgaactgctgataaaacaacgtggatgagtgtcagaaacattatggtgagcaaaagaagatgagccaggagaacatactatgtgattccatttatatgagttctagaaaaagaaaaaaaaaaactctaccgataaacagccaatcactggatactcaaggctgagcttcaagggaagctctgtacaaggctgtgcaaaaggggcacaagagaatcatttaaaatgttgaaaccttccctatcttgatcatggtgtttgttgcttaggcttatgcatttttcaaaacccattgtacactttaaatgagtgtgttttattatagataaattaaactgcaatataaagtgatttaaaatgcaaaaaaaaggaaactgaagtagaactggactctaagaaaaacttcagaacatcagattattttttatctaaaatatgtatgaaattggagtcaaagaacagaagaaaggttttaaaaaagaaaaggaagaattatgatgtcttcatttgaatcaaattcctactcactacagtttccaactacagtctgtatctcaatccactggatttttccattccaacagtgacctattgcttttgtcaagattcccaatagtcaagacattaagaaagtaattgatatttctaaaatgttaactgttaatgtgaccacaagaggactcagtgtgtctgccagagctgaagttattcctttagagaaaagtttgatctaagccaactcttatcccatgcctccaaatttcaataaagatatatttcaagcattcaggctctattacttaagctttttttgaagaacgtgaaggcttgtatgtgactcctcattctggtgcttctgactttagtcagtttagacagctccttgtcttttttctcccaccttggggtaaacttttaataacaatctagagtcagttactcctttctcatcctgtccttatctcttcaggcccgtggcactttttttttttttgagaggcgtggtggtgaggaacagaatcacggaatattagagtggaaaggtcattctctgagtcgttaaatccagttttgtcattttatagagaggagaactgaggcccagagaaggagagggactttcctaatatctcataactcttaggagtggaaaccagccccggccccttgcagccctgcactgtgtgggaacacagcctgcttctctctctgacttggcctctttggtggcaagagagagacatttttcatgtgttttcaaggacattgctgaagaacaaggaataaagggaccatgatgtatatgttgcaaaacatggatacttgaaagcagtcttcagtcactacctgcataaattactttgctaaccctttggggtgaaaattcctgtggcttgcacatttcagaagagtttgaggttttctttctttctttttctttgtttttctgaagctatgaatttgttttggaggagagacttttcactttagccttgctgcagggatttacagtaatcttttaaaaactatgctgaagagagagaagcctgtcataaatttgatctatttcctcagtcataactagggagagctcaccatctgaagctttgtaaaggtagagaccgggcttgttttccctcctggctgggttcgttgctaattgctgtactgttattaaaacaaagggctgatctataaatgccccagaactacacaactatacccaatcagggctgtaatcagaccacccgatgttttatggactcggtgtcttggcaatccagaggcacgccagtgggggcagtttctgctttgtctgctcattaaactttggacaccttttctttgttgctgggccagtcattcccacaatctgattggccagagttgatgctgtttgaaatgggcaaattttatacttactctgaaaaacgagcaataattccaaagagtatttgtttaaaagagcaaaagtcactgttaaatgagcagattgcctgaaaatagatttatctgaacgttctgagactaggaaaaaatttattgtggctgccaggtacaatattattcacatttcaagagagagaatgatgatattaataccttaccttaggtaactgcctttagcctttgcacagctccttagtatctgtgatttacatcctccaaatatccctatgaaggtgaaggttggggtgtgtgtgttagtgactacattgactacatataacatattaagatgtgagactttgaagtcattcattgattgattcatcagatatttttggagtacttcctatgtgtcagatactgtaataggcactagactagaacagaccacatgcacaaatgagcagaacagactaaaactccttgctgttacagaacctgtgttctagtggggtccacatgcctgtgtttacatgtgttgctgctagttgtgtgaccttgggcaagctacttattcctatcgagtttgttttctcgtgtgtaacatggtgttcataattgctgctgcataacattttgtgagaattaatgtgacaatgtatgtgcagtgcttagcacatagcaagtgctcatgaatggtagccaccaagatggctgttgtcattttagtttgcagcagttccacttgtcatcattgagttcccagggagtcccctcttctttgggaacagacttgctctctgttgctccattgcggtaaaaacagatgaggttaatccctgtcccaatcattttggagatggcgtcgtttgtattccaattccacagcccagttcttgtctttgtcttccttttatttaagcagcagccacacagaattagcccttttcaaaaataaataagattatcatcctgttttgcgtccctggggtaacagactctaacatttctttctctttctcttctttcagattgtttagtgtaattttggaacaattaaccaaagaaacagaaggcgggaaccactcaagcggcaaatctggaggctttgatgtcaaagccctccgtgcctttcgagtgttgcgaccacttcgactagtgtcaggagtgcccagtaagcacttattgtttcctagagtcaggagtgtgctggttttttcttccaggtgggtttcagaatcactggtgctttgaggtgagttgctctgtgccagccaggggtcagcagatgaccatggcctccttcacagttgacaggacactttggcttgcactgtcacgttggatccccatgacagaatgacaggcagttattgtcattctgattttgtggacgaaagaatcttctcttgcagaaagacaaggtgaggtgttggggtgagaccttgggttcaggcctttaattccagtctatttttcctctctggcaacatgctgccatccacgcctccactcccaggcctgcccctctgaaagtggtgggtttgtggatgagggtgttggagtacttagctgcgtgcctttttttttttccccaaatggggagcatcagagggatggactcctggaaactctgattagatcctctactatcaggaactgtgctacccagctctgggggaagggatgaatgcttcttacctggtgacagggcacaggagtacctgccttgaaggctgttgtgagaactgagtgagataatggagggagagcccctaacaggatgtctggagcacagaggctctcagtgggtgagagagagagttttagccgttaggccctaccataccactcagtgccaggccccagtgtgcttctggctccaggcccccaggccaggttaaatcatacctgagttggaatagatgccctgtctgtgccctggccaacagctgcagcctcttatccttccataaggtgtttggggttgcctcactgggctctgcccctgataggactcctgtgttggggacttccatgggtagaagtcctaacacctttctgagggctggtgcgtctgagcaagaatatgggattgcagggtgtgcctgtttttcacaactcataaagccatcagaagaacacagatcacattttttgcctctccagaagttcttcatgaaatttttattaaatttgttggcacttagaatgcaccaaaaatcctctggaaaaaaaaatttccaaatttaacattttaaaatgtaggaagtggtgttttatgtgtacttgtttttccagatggttcatttattttcattgaaaaagatcagcacaagtcaaaaccacagaactgtgtggaatcaattgagaaaaacagaaataccttggaaatgactggctctgttaagtgtaacacgattaaatgagaagttcagtgagcaaacatgttcttccagatttagttgttatagcttaatctaatttcaaagtaaccacgacagctttttcccccaaagagcaaataacaggacagcctgtctatggtatgtgttgtgtgcagactttgggggctgtggctgtgtgcgtgtgtgcgtgcgagcttctggccagtgaaaaatccaagaactcacatagcattgtgtctgcttccttggctaatgaggtttttactaaactagtgcagtgctcctagatattgagaattagttttaaactgtatttcttcctttccccaacagacatcactgtttgaaatttgatagggagatttgtatgtaactctcccccaggtcagcagggaaaaatgtgagtctgagtcttgtatgaggacttttgagcttatatttttaaccacctaggtagggaacatcccagtctctcatcaaactcaaataggcttttgaagaaaaggatcagaggttgtcggatgtgctgtttctagtgctggttggcagccgtggcctgctgatttcttctctagtacttgaagttgttaaaaatgtccaggaatgtttgactgtttacacttatcttggaattgtttagtccctgctaaagagaatccagactgttctgtaagacataattttgtgtgcatgtgtgtatggaaatatatattcattcagtgaaaggtaaatttatttcacaaggtggtgaatcaggcatttgtggagttcttaagcacccacattaagagactgagggagaatgggcaggaaccgagaacccaccctggagaccaggccttctgacccctgtgttgacgtcccccattctctccacagccccgcgacctcagcactactgtgctgctcactgtttaacttcttaccttctctttccctgtccttccgtgttggacagggaaacatttatcaaagttcaagaccatcaaagtggaaaagaatcctaaagatcatctggtctacctgcatcttttagacaaggaaactgaggcctgttggaggtagtgactagtgtaagttctcacagctagtgagtagccagacagaaccagacccacgatctccacatttctgacccggtgttcttcccacttctgcctccttgactagagtcccatgagatccactgagatctaccgtacatgttgattatgtacaaaggagcggaatgcaataaagtatacatgttcacagtcggatacaactttatcatctcataaatgtgacaaatctgaaatacagtagttactctaaatgtaaaaaatattcacaaagcttactgccatggaatttagaagagctaactgctgggggttagttttgcatggcccattggtgtctcaagaaaaccaaaacaatgatagaaacctggccatggggattggaacgggtgtcgtcttttcctttccatgtgttccttgtaggaggtaaaaatattgaaaatcatcctaattgatcatttttgaaaaaaccatgtggacatttacatatccaaagatgtagcacccagagttttagttgtaatagaggttgtagcaaggcagggtcgtgctgagtctgaaatcctcttactgctcttccctcaccatcctctcccctgcctcctcctgtgctgcttatcacggtaaagatttgtcattattgctaagtcttctctttgcttgctgtattctggtttccgatgtaagcatctcagcttcttgcattctttctttcctgactatgtattgggaaagtgagatgatagcagaagatggaaagtttgaaggtggagagacaacagggaaggacagggaaggagaaggtaagaaggaaaagagtgagcagcacagtcgtgctgaggtcgtggggccatggagaggatgggggatgccaatgcaaggtcaggaggcctggtctccagggcaggttctggattcctgcccattctccctcagtctcttggttcctcacaaccaatcctaatcctgagtgctgcccccatccttcttttcatgacctctttttctgtcccttggcgggtagccttacccacactctggcactgagtatgactccatgggtagcttctattaggttggtgtgaacgtaattgcggtttttgccattgaaagtaatgggtctgagtctgaggatttcagactcagcaagaccctgtcttcctaagacctccatggcagcaaaagttttaaatgtaggaaataatcgtctctctctctctctctctcttttttttggagacgaagtcttgctctgtcacccagactggagttgcaacctccacctcccaggttcaagtgattcccccacctcagtctcccgagtagctgggactacaggcgcacaccgccacacccaactaatttttgtatttttggtagagatggggtttcatcatgttggccaggctggtctcgaactcctgacctcaagtgatccatctgcctcggcctcccaaagtgctgggattacaggcgtgagctacctcacaagggcagaagtaatcatttctcatgtgcctgtctctcaagaccacatttcagcttcaggacacgtctaccttaatgttacataataccaacatcatacttaacaaggctcaagtcagtctcaacctcccccttcccctcccacctccctcattcctggagaacctccctttggaatgcttagttttgttggggacactgggattttgcctcaagaccctggctcaaataactggtgtgctccataggtaccttcctctcattctgactcagttgctgagttctggtctcatcctgatcttcaccctcacctaccccagcattcttgaactacctctctgtgtgtctggcctgctgctgtcctgttggtctttctaaagcagctgccttttgctagtgatctaaagtttggcttcatgacctggattcaacacccacaaccctggctgcaatctacttttctttcgtgattttcttttccactaaccaccaatcaagactcaccaccctcaagcccatactgtgctactctcctctgtgcttttggtactctgttcttcttccctgaagttgcctctctcccatgcccacctgtggaaatccaccccacctggcctttgggctgtgcccagagagaagctgcctcaggaccctttcttcaccccattcatccctacttgtcacctgcatggaccttgggggactgaacaaaggatgatgaacatgggaataaagacaaagacaaaagagtatatttggaagaaggggtcagggggctccttgcttctagtgaacaagagccctgagcttcagagcctttcacattttactgggtaaaggagatagggagagaggggagttgttgtcggtcagcagcttgatttacagcagacttgcaagactgcattcttctaacaacaggctctagatgtcccagtagataacctcaatgagcacggtgccagggagtgattgccctcagcaaacctggcggtaggcacagtcgtgagtttgcccacatcctgcattcatgataaacagtttgctgtttgatcatatagcctccagtggaatgctgagttggtcacaatccctttggccttttcaactcccaacacctattaattttaactattgggatatttatatagcatctatgtgctaccccagggtagagttatttgtgtttaattctatgtctcctagaatataattttttgagggaaaacattttacataaaccgtcttcatattgctccaaagcaccaaaccttatgatttccacatggtagatgtttaagagattttgtcagatggatgaagaaatgcataaatgaatgatgaactttgacattgggcagtcccctccctaggccttagtttttccctctgtctagtgagggagtttgactagatgatccttaaggttccttttcagtctatctcacatccaggcttaatattaatgaaaagctttgaaatacctctttgaattttattactatgtgttctaagtaaaggaggcatggttaggaattatatatatgattcattggagtgccttcctggctcacaaacttatttttttttgtctttcctaggtttacaagttgtcctgaactccattataaaagccatggttcccctccttcacatagcccttttggtattatttgtaatcataatctatgctattataggattggaactttttattggaaaaatgcacaaaacatgtttttttgctgactcaggtgagtaatgagaattgtagctaacttaactttaaaatttttttgttttccccaaagcaactttcatggtttggggaaaatctaaaacaaaataggaaaaaaaatgcccaatataccagcacatttactgagccagttctcagtgtgagctatgttcagaatagatgagaattcagtctccctttccaccccgatttcctgtgtaatgtgtcctggcaaacaagataagagacctccaaagtaaaaacatgaggcaaaccaacagcattgtgctatctaagcctaaggaggatgctgtaagcgcaggtgcagaggaaaagaaccatggatgctgacaagaggaaatggcagattccgctaaggagggagcatttgaagggaaccttgaaggacaagcaggatcctgaggcaacgcagatggggcggtagggtgtcccgggctctggcaagggttctcaccttccgctggcttggatttcctgatgtttctgtcctgagcggtacagcctgtttgctctgtttgcagatatcgtagctgaagaggacccagctccatgtgcgttctcagggaatggacgccagtgtactgccaatggcacggaatgtaggagtggctgggttggcccgaacggaggcatcaccaactttgataactttgcctttgccatgcttactgtgtttcagtgcatcaccatggagggctggacagacgtgctctactgggtaagtaccctggggagagagtttatggagtgttctttgcttggataagtgggttttgtgagctagagccactggagaggtggctggaaaagaaaccctgaagtcagttatttgggaagggaagcagatgctgtctttaccagcagtcttcatcatcctgctcctcgagggccttagtttcagttgcaggaagctgctgcgcgatgttggcttctggctttagtcctctacttcccagtgctgcctgaagacctggtgccaagggtgcccagtggtcccctttggaggaactccaggaagccagggctatcctgattcaactcttaagagagccaaagggtcactttccaggtaaggaggctcctggactgccacaggctaaggttaatcatttatacatcaaggcaggttgctctactagatcctaaagggaagaaagggaatgtaaatcggatccctttcatgcttttcataactcagtataaccttaaacccagtgtgagtttctcccatgataatatttcccattctttagtattactataaatcatcccagcacaaaaccttagctgtcttcctttctatttgaagctacagacctctggcagaaagggtaggaatggcacgtagacttccagggctggtggacccatccagcctgccatgaaaacagttggacactctttcaaggcgagggtctgattcctcttgttcctgatagagccagaaagatttgctgtataaaaataagtgctatagcattttaacagccatttcccagggctgagtttgttagaatgcaaatgaaagctcacagaagtttagaaattgtttttcacggtataagagttgctggtaaagacagctaacatgtagattttgagcctaaatccaagtccaaaggggagtaaccaggattccaatcatgagttgttaaaaggaaattagtaataaagtagttctgaaatcagcagcttttagacagaaggcctgtaaattgataagtagcttctggtagtttctaaattttagatacttttcaggatttcctatactccataacttcaaagaatgtaacatataatggttataaataggtttttgctgcccttcagcagctcacaggattgtagatgtccctatatatttaatatgaggcaaagaagttatatttttatctttaatccccaaagtcagtctagtttgatcaggtttaagcatcaccaacatgttatatcttgtttttcctacttccctttctttttctgattgtcataggagtgtgagtgtgtgtgtgtgtgtatgcatgtgtgtgtgtgtgtgtatgcacatctgttatttatattcataaaacgtcttttcataaagaggaaggaggaaggagatgatattggctgagccaggggcatggcttctgtatgcaggagggccctcaggttaggtgaagcattcatttttgctattatttcctaaattgcaacttctagtcagattagttgagatctcaattccagtcttcccttgaagtttttcataaatagaaaaagcatcatcaaaatagcccaaactgatacttcccctccccaaacagtacataaaacaacattttgatttttttaaaaatcaaaatctgtgactcttctcagctttgtttttctctctattgacatggtgaattgtcagctgcagagccaacatgccttgactgatgaaaaattttatactttatgttatattccttcacatcgattctcagaattttcctgttgccaagcaagtgtaaaacctgggagtagatgattaaaggagagggaacttcaggctcctagaagcaaaagtttccgcttactttcctgagaaggtttaaatatcatctaggatgatataattattatttttattattaatatgacaatcacgtggttaatactttgacagtataattgcactctccataaattacacagcatctttattctggtggggatctcaagccattcataaactttatcccagtctgtatccctttatagaaggtctgggatcttgaagatggagacagtggcgtagagaccatggaacattccccgagttctacagcaaatggttgtggtccttgatctagaacagtggtctataaaccttttcataagggggcaaatagaaaatgtatttggccttgcaggctacatggtcacctcagcaactgttcagcccttccactatagctaggaagcagccatgggcaatacataagcaaatggatgtggctttattctaatcagacttcatttatggaccctggaatttgaattttgtatgatttttctgtgtcatgaaatattttgcttttgattttttcccccaccaactatttcaaattgtaaaaatcatttttagcttgaggccatataaaagcatacagcaagctagatttggtctgcaggtcatgctgtgggaccccctggcctagactagaacccagcactctttccttggcattcttccacctgtcagcagttgatgaatccttccagaacactagggggcagctaagtaatgtcttcccgactgttctctaagattttactctctgaaacacatcaggattgtttttaattacctgttgattgcatttattagctcatcatagagataggcaggggccaaggaaccaagccttcctaatatttcatgggccacagtcagctggaagccacaccgctgtgatacacagcagaacatccctgcccagcatggtgcctggcaccgagcaggcactcaataaacacaagggatggtcatcatccttcaagtgtaccaggcatattgcctcattagtgtagatgtgccatgtttgaatatctatttttatccacaactagggcataaaggggacatcttgggagataaaaagagattagattttaaatattgactacaagcacatttctgaatcctttaggcacttacatatggtggacaaagtctttgcgggtcattgttttgcatctagtcaagtttatattcagtcagcgttctcaagctcatttatgccttgcttctcactagtgtctggaaaatgtctggcagggtcttgagaagggaagtaaaggtgggtccaatatgtagaaaggcacacttagaacaggactatttggatgtgtgggaagtgggatcattaagttctggtggaaagaaacctatggtagagttctttgataaagtgagttccataaatataattgagctgttgtttgactcacatgtgagtgtttgttgctcacagaggcagtagggtgtagggcagggaaagagtgtttatttagcctggttgtgtgaccttgagtagttcatggaacctctctgggcttctcaagatgcagaaataaacttacatgatttaatttttcccttcaacttagaggaaattttttttccttcaattcaaagaaattgtttttaaatgcaggaaataaaaagtattggtttcaggagacagctatccagataaataatttcggtgtcttgtcttagcaccaagctcttttctcagtgcacactcctacggaggtgctggctgtcagaccttcacgggaagtactcatggtcaagctgacagtctccttcattcagggcacctaggaaatctctctgtaaccagccgagggcttgcctttttcttattgcatgctctggggtgttaaaaccagtataccaagtttccagaagtgttttcagcagctagaaaaacagccttgcattggtctataacttgagacatgaatatgcatttcaaccttttatttttattttttacatttttttgagacggagttttgctctgttgcccaggctggagtgcaatggcgtgatcttggctcactgcaacctctgcctccggggttcaagcgattctcgtgcctcagcctcccaagtagctgggattacaggtccttgctaccacgcccagctaatttttgtatttttagtagagacgggtttcaccatgttggccaggctggtctcgaactcccaaactcagggtgatccacctgccttggcctcccaaagtgttgggattgcaggcgtgagctgctgcacccggcccatttcagccttctaaaagaaggaaaactgaagctaaaaagaaaattatttcctgggcaccagatgacaccccttgatgactttgatataagttttttaaaaattagtctaaattgaagtccttcagtggaagccagtttcttcattgttgataaagaccatacaggcaaaatcccaagcagtctctattttcacgtgggtatttttgggaacagcttgcatgttctgatttttcttttgtatatggtaagatccaagaaatgcttggctctgaaaagggacttggattgagaagggttcaatgggagcaagaccgttctcagagccgaagcttgtctctcttgccccaccttctgacttagagatttggaatctccagtggactgtattcatctccagccttcccctccaggcctcaactgtcattccaagtgatacttctgatttgagcaaatgtgaatctgatgaacacctactcccaagaaattaaaagggttttaaattttttaaaggaaaattttccctcccaagtagagaagacagctgttactagagccattctctggaacaccagactgaggcctgaaggagggttggtgaagcagatggctcagcagatgacggttgctagggtcatggaagagtgaggtttcctgatgggagccctggacctgtctgccctcccgtcaccttgttgggcaccttctcccctgctgcatgcacctctgttccaacacagagggaaacaagcccaggtggggctctgtctcaggtgctgacccaggccaggcacaggccaccacaccaggcagccagttccttcttcatatatgggtttttcagtaagtttagtggtatagttgctctggatgaattaccctctgccttcctgctgaaattagtttatccaacttaattagatcaacaattgcagccacagcccaggctcattcattactctaattgccaatgtaagatgtgcagactgatatgagttctattaagcacatcaattttcatgtggccaaacaggtgtttcataagggatttaatgccctctccctagacttcagcaacagatgttaggtaattttttttaatgttcactttccctatttggcttctcgaggcaaacattgtgaaatgcacgagcctcattctgtaaagttaaaacctggagccagatcatatgcaggaaagcacatgcttaacaccctaagggcttgcacctgcaaggcaagagcgatggctctatccagactgtttgcagttctcattggctgaaaattctgggtgttgtggcagggtcataccttgggccatccattctgtcccctgactggttcttaacacctccttcctgggaaaggtgttttgctgaatttaacattgacctgtgctgctggaaagttccatccagctgtgatccttaaagccctgtttgctctagcttcctttggccaggtctgccagggagactgtgtctgaatgtgcagcatgagcttgtccgggaataggggaatggggttcctcaggccacaccctttcacctctaaacccagtcagctcacagctggagccagtctcccaggggggtcatctagatcaaagctaagtgtggagaataagggctgcttctcctttctgtgggtgcagctaagaaaaagcccattccccaaagagcccgtggcttgtgtcagctagttgaccttgaaaaaatttctttttcacattcattttgctgcattcattttgtttgcactcacaggttgcagataatccagatctaaggtgggtttggtttccttgggtaggttggtttccagtagaagattattttaggagtttttaaaaagagtttatagagtcagatggtacaagtttgtctctataattaagacttttccaccatcacaaactttaaacacaaagtctaaaatcttgggcagcatagaaaataggttctagctaagcaggagttttgtcctctaccaagacctttcctgaaaatcacttatcaagacagtttcctgtaagaaaaagccatatcccagctgattttccttcctggggccaaaatctgctattattcggcctgaaagccttgatgactctgtgtgtgtgtgtgtgtgtgtgtgtgtgtgtgtgtgtgtgtgtgtgtatggatgcttgtgtgtgtgtatggggaatatgtgattaatgtgtgttggctgctgttgtctctgatttggctactgttgtttctgatttaaatctaagtaaatgtttaattaaatgtatagaatgctgtctctaatgtgaccctctctccttattaaatcctcttattaacccactcctatgagaccatcttatttcttgcagatgaatgatgctatgggatttgaattgccctgggtgtattttgtcagtctcgtcatctttgggtcatttttcgtactaaatcttgtacttggtgtattgagcgggtaagctacacctctttcatcttgaaagcagagtcctgaggacagttgccaagaccacacaagctttgctggatgagggccgccaagaggggttgccagacattttatgtgtcctctgagatgctttcttttctgctgaggcttcccaaatcaagctgtttcctggaacctcaccaggcttcatgaaggagaactatagaacgattattgaccagaaattaatcagcattgttgcttgagatttaaacaatttccatagcatgccctttttttgtctgttctaaagtgagatacatttataattgctttatttgtctggatccaaatataatgcagattaattgttataaaacgatagcaaaatgagctggattgggtgggcttttggtagtccccatttgtagatttcagccgctgagcttgtccttatttgcagaaaaaaaaaaaaaagggaaggacctaggcccagtccctgtcctaggagcactaaccttcagcaaagcactgagaggtttggcagctgcaactggggctctgctctttagtaaatggataactgataactgatctccttacattttacaggtaaatgatgcgataggatgggaatggccatgggtgtattttgttagtctgatcatccttggctcatttttcgtccttaacctggttcttggtgtccttagtgggtaagcagtcggatccgtgttgcaccttctcctgctgccacgtgtgaggcaactctgcgtgtctcctagctgctccctgacagcttctctgcatgtgtttggactctgatgtcctctcagtgtgttgcttttggattgaactgtgattctttctgcctgtatctgtctgtgagattccgtgtttccaatgcttgccaaacactgttaatttaatgaaaacgttcccccaaagccagttgtgttagtatgtgaacgtgtagaggtggattacaagtgagttaaaggaattccagccttggtctcccccaggaaagaggcttttgtcccttgtcattttgtgtctattagtacataactccttgtcgttttgtgtctattagtacataacctggcccctttaggtcaccacagtgcattataaatacttccaggggagttttagattttactgtgaaggagaaataagcctcaagcacataaatactggacagtttcaaaatcttccttagattgggattctttattagcttggtgttctagtgctgtcattgtgagaactgtccctgtgattcagttttaaccgaaacttacagaatccttctcttaatgcagagtgatgatcgacttttgtgcacacatttcccatggccttacagagaccccgtcattcagtcacgatttttgaagtttgcttgtttatcacttcctctctatggattgactctccataaagagggtgcaacagattctggcctggaaagggaactccttatgttgcaggctctgccttgcccgtagctggagatgccatcccagaacccttgtgggcagccctgcatccacaccgcctctcagacacccccagaaggtggggtgctacagagaagggagctgggggctgtatggctctctcacaatcagctccttcatacagccattgccgggttgtggggggcaggcaggataccaggaggccaagaggggcccacgtctcccagaggagcctctgtcactgcgctgcgcccaggcaccctcaggaagtagtgttgatggatttgattccaggcaagtttatctcctcctcactcactttatcttgctctttccgaggctgtatctcggggaagtgatgtcttcatgtatgctgagttagtgaaaggctttaatcgcatttttggaaacactgccttttccagagcagaaagcagagtgcgtttatccatctcggcttcctttctgcatcttcccctaaacctgccctggattgaatgtagtcagttccacaccagggacgcatactgtcacaggaagtccctatgtagagttggcccaggggccagtgcccgccagagagaggagtgggggctgagcctgggatggggccacataaccctcccctgcctgagccgcctcctgtagatgagtggctcctcaagcctccggcccttccacctcaacgtgagaagtgtctctctcctagtaaacctcagtggccttaggctagggttggacatgtgagggtggtgtctattcctggagaaataacatcgcatttgattttgccacaggagctttctatacaaggttaacagcaatcctgttgtgaattccttggcgcctcatgtctcctaaacccagctaaactgacggaggccatggaaaccactaattttaacagtgccggtgacatcccttatcttttagctttcccaggcaggaaccgttgccccagcagacatgatgaagtagaggcaggagccagatcgtgaggtgcttaaaaaaagaaaagagaaaaagatgggcgggggggcttcccactatcacaaatggggattaaacctgcaactccgtgggaggtacccaaagctggaggataaaaaaggtacactccttcatggaacaaccagtttactgaaatatattttggggggaaataatttttttaaaaaatattttttcatcaaaacaaaacttagatccctgatggaggagactggaaatgacacatgaaattataaaagaaaacccgagacttctctgcgatttttaactgtcagtgcgggctgtgctcaaacccctagaggctgcacatgacctcctctctactcccccagaaggcctccggtagggctggtttgggtaaaggcagaaccatgtctgcaaagcacagcctcgcagctttgttcctgatttggccagtatttcctgagatcctgtagagtgcccggctctggtccagaggcgaggggtgccaggatgtctcagacacagacagcggccttgtgcttaggcgttcattatctcatggggtagcccattttgaagcagtgcagaagggcacatattcagtagaggtgcagacccagaggctctgtgagctgcactagagagatgaggaggcatctcccccggcgactgacgatgggctggcatgcctccacctccgcccctccgccccctcgccctcccaaccaccaccttccctctctgcctgctactcccctcttactttcccattgatatttttgttgttgtttaagcaaattattattatttttttaaattttagcctcaagagtcttcataattttttaagggaacactagaggtactgcaaaaccagaaggatataaatgttgagaggaagacaatttgtgttgcatagaccctgagggactgtcagaccaacacaaatgtaatccgctaagcactgaattaaaacgccctcattttagaaaggctggtcgagaccatgtgattgccttctcacgaggaaatgttagatggtgctgtatgtcttcaagtctgtcagccatttggaaatacctgtatctgtttttgctccttggctccgtcatgtgtgtggccatgccatcctattgtattcttgaacagactttaatctgcacattggatttggtgtttatttgtaaagtgttgtaacactgatgctttgggaaaatctttggttttataacagtcttttttccctcaaggtaagtatgaagtttatgaactgtaaaccctatgcagccatgcatgaatatagatgaatacttccatctctgatcacagtgctctgtgggaggggctgagaatgtctatgtctaatgttgcaatttaaccttaagttgtcattgaggatatgctcccattatgaccaggaattggaaagaatgtcttctttaagtctgcaattcagacatattacacgtggtcttctagaagtttggcaatttttcacttttcaaattgttaattgaactcccttttgaggttttcatctttagaatcatgctagattcccagggggaccatgggggtcatgggtggtaggctggttggctctgcctccttctccatttcagggcccacctgccaccagccatccctatggtggcagtgtctgagcttgcaagatgggggacgccctaggctcccaggatgtggctccaacccccaggaagggggctggaagacttgggttccgtcctgctggagtcccgcgttcactctgggacttcactgagttaccctgagcctcggtctctttgtccttcaggatatcagcgacatcctgtcttgccgtctcccacacagggtggttttcaatcagctaatgactgtagaagtgcttctaaaaatacataaagggtttttctaatttaacatatccttatcttaaatccgtggatatcccccactcccctcactgggttaggtgggaagggtgcagggtactctttggaaattctggagtgtagcattttctggatttcccagcaggtggccacactttacacacacatcaacgttgtactcaatgtcacccaagaggtggctctggagaatgtggaagcactgtgtcagctgcaaagtattacgcaggtctaagtcattgttattatatatttgacaatgtttttttgcacaaattgaggggaacggcatttctattacatagtggttaagcacaccagctttagaatcagacaaccaagtcttgaatgtttgttctaccttttccagttgtgagatttggggcaagttacttacctctttgagccttactttcctcatctgtgaaatggagctcatcacagtagcagcttcgtgaagttcagtgaggactcagtgagctgaagaatgtagagggcttggcctattgaaattatgacagttcaggaagggtgcatctcttcctggatttgatgcaagaaaagaatcgaatcaattcagtcctttcaaactaattaataatagctggccaagataggtctgtgttagtgaaaagcccaagttatatttttaaaatgttttattatatatataatgacataagctactgctgactaaaggatattactacataaaccccctcctgggcttgctttaaagaatagatcaaaatcatttataattcgcttatgaattcaaacctttggttttggcaacaacttatgaaaaatatttgaaatactttgttaagtagatcttgtatgttgttagacaataaatattgttattaaacccactcttatgacataaaattgaatgtaaacccagcccaggtctataaattcaaaatcataccaattaatttgtattcttggtgttctagtaagttccagatcctaccagatcacaggtatcattttaaatcaatccaattttgtattactataggcctatttatctttagaagtttaagggaacatggatgaagcgaagcattatagaaaactgaaggcaattttcaaactagtttatgtttttgaatctcgcctcctacatcccattctggctaattggataccaggggcctagacaaagactcaggcatggctacttttaggaagctttggtttcctaaggcaaagattcatgggatggagaatgtgaagagggaaggtggtgctggtgccggtgtactgtggactgactataccagaattttacatagtggaatcaggtttggtccatttaaattcatactagtaatagccagacaatctctgatttcttctacttgaatggtggctcaagaggcaaaacacaccaatagatagtagttgtattacttgtgaatattttctaagtggagacatatcctctgggaataggcattcttatacatttttcatgactgagattagatttttctctcatttggccaggcacagtggctcacgcctataatcccagcactttcggaggccgaggcagctggaccacccgagatcaggagtttgagaccagcctgactaaggcagtgaaaccctgtctctactaaaaatacaaaaattagccaggcatggtggcgcatgcctgtaatcccagctacttgggaggctgaggcaggagaatcacttgaaccagggaggtggagattgcagtgagccaagactgcaccattgcattccagcctgggtgacaagagcaaaactccatctcaaaaaaaaaaaaaaaaaaaaaaaaaaaaaaaaaaaaagacttttctctcattcaacactttaccagcatctactgacagaaaatggacaattgaatttcctccaatatatatacctctgatatgtctgctttgtaaaagagtagtgtaattgcttacaacattgaaaaggttgttattggggtcctggggtagccaggatatcggcatgatttgtcaccatattcagaataaaactgtactgcaatagtgagttaattccatatcttggccaacagagaatttttggccagtggctactaaggcacacggaagtccagtctaaaagggacaggggaggactctttgtagatagttcttatgattaaaaaataacttcctatgtgttgtagtgatgattaagctgacagaatgctaaagacacccttaatgattacttgtagcaaagtacttccccacatttagctggatttgtctttggtttgaagaggctaatacgtgaaagatttgttcacagttggatgtccccttttctgaaccatgaagtaatattgtgaatggagttgaatgctgaggttagggtgccggaaagattcagggtccttcggtaccctcacatggcttggctttggtagaacaagaaactaagctctgatttggctttaaatgagagtgctaaatttcctttttctaataaagaacctagctaaacatttatatatacttttgaacactgaactttcttgttgcagagttaacagctgttgggggtagctgacagctggatcctggtgctgttggtaccatggtacctgaagtgcacaggctggtagccacacctgacattaacaagtgagtggtaacctctctgccgctggcttacagctactgtttccatagaaatggctgtcgggatcagtggaaacgaggtaagtgaaagttttcgctgatccttgtttccatcaagctgacgtctgtttccctggcaacagcagtggacagcagccaggcgctagcaacagattcagtagagctctcacttgtcagctgtggctatcatctgttcctgaccaagttctttttttttttttaataatgtacagaaagacctctgaggacccaggaggcacctctggccacatgtgccctcctggatgctcgttttgcagatggagagctgtgtgctgagttgacttctctgtccgcagttccccctccacctgtgctctgggttgttgatgtgcaggttagaagagggaggttgttgagggtattagtgttgcaggggaggctgttgaatctgttgatcccaaatcctaggggaagagaattcattacagtgctttcatgcacagacccagctctttataaagctgttgctaccttaatagttgaaattaaagccataattttcctgtggtccctattcaattggaggcattaacaattgccattacttttacaatgaaaaggatatttaggagtttaataatttggcttgtgagaaacaaattgatgattgtctctaagatgctactgtcaacattatgctttttttctcttttgtgtaatattcttttacaggatggtaaaattgcttttacagagatcaaatattggtattgcagggcagcttggtatacaaagaccagtagatctatagtgtagggaactcttccttgttaaagttcaacagctccttttctggatttcattttaatgtttcaacagatggatgcacccaagccctagccctaagtattctccacccatatgagacagcattgatggtgccacagagcaaaggagagccactgttcctgccctggtgtgtgagatgagaggcatggaatgaggtgttggttttaagcccttactgataccatttattaaagagattttctctggaaaaaacaaaacagctttgatattcagagctgtatttttgagactcaaatgaacataaagatccacggtcttatgagaacttagatcggctgctagaagagcattggagaaccatggagttttgtctttggagggctttccggatgacattgttccacagctctctggaaatagggcaactgtgcttggcctgcaggcagttgaatttgatataacagacgaataagaagcagaaaatcctgctggatccttttttctccctctctcttaacttcctaagaatgacttattcatttaatgaattttttttcagttcctacacagtggtagatgtatgccaagtgccctgctaggcactggggttacagtggtggaatgtaggcactgggtaggcaccaggattacagtggtgggatgtaggcaccagggttacggtggtgggatgtaggcaccgtgtaggcactgcagtgacagtgtggaatgaaatggtttctttcttcgtgaagcttatatctaatgatggaggccaaaatgacaattacaaactcgtataaatgctttgaaagaaaggttcatgtgctgtgagagggtttaacaggcacaactgctgtcagtttattgggtaggagcatcctggaagtgaagaatgagtagtccacatatccaggcaaggtgggacaagaagctagggcaagggtattctagtcaagggaaaacccacagaaaggaggtacagtaggaaggagcagaggatgctggaggaactgaacgaagctagggtgacaggaactgggagagctggagatgaagtcagatgaaaggaaagagactggccggcagaatccaggtcacgtaggacctttagactatgtcacaggttttggtcattagctgaagggtaagagaatgcatggatgaattttaagcagggagtgatattcaaatttacattttctaaaaattatgctgtattctcatatcctcaacttaccttaaaatgcttcaaaaagataagatgattaatagatggatagggggatgcagagataggtgataaagaaaatgtagcagctgggtgctgtggcttgcacctgtaatccgagcaattcagaagggtgaggtggaagggttgcttgaggccgggagtttgaaaccagcctgggcgacatagcgaggctttgtctctggtacaaaaaaaaaaaaaaaaaaaaaaaaaaaaacagaagtctttttagctgggcaatgtggtgtgtgcctatagtcccagctactcaggaggctgagacaggaggatcgcttgagcctaggagtttgaggttgcagtgagctatgatcatgcttctgcactccagcctggggagcagagtgagaccctgtcttaaaaaaaaaaaagaagaagaagaaaaggtagcaggtgttaattatggaatctaggtgaggtaggcatatgggtgttcattgtataattgtttctacttttatggatgtttgaaattcttcctaataaaatgttgggaaaatctgcatatgaaaatcactgtggctgcagtaatatgaatagattggatggatacacaaatggatgtagagagaccaacttaaggctcatataatctgcttccagccacaacatactagtgctaccagactggacctttcaccataaacaactacaaaagactgggcaaaaaataggaagcaactattttcagaaaatggaaataggatatacaggattgcaatccctacgagaagggaaacacatgaggtaaactccgcaattgtcctggctttctgcctggagacagttttagaattatggcagagagggagagcccagcagagaacgatggtctatttgctgaggggtcaaagaacagtgttcagggctgctaagatagctgggattttcagggcagagtatgggtgagaagtatgcagagaaggggctccagtactcagagtggaggttctttgaaatctgaccatatactaagctgcttctgtgccaggtgatacttattgaagccaggcagagaacagctagtagaatgctgtaagtggttggaaatctctccatgctgggaggtatatggttctgctcagctgtagtggaaggacctaattgaatacattgggtactgagacttcagaaacgccaggctttagggttggagctactttagcccttgagtaagcctactgtagacctgacttaaaaagcatagaaacaagcttcaaaaggatcagggaaatggccaataaattaaacacctgtcaaaaagacaaaaatcaacactcgttaaaggaagagaccaaaactcagatgttcccagaatgtttttcctcatgacccaaaactataagacatgaaaagaagcaggaaaatattcacgatcaaggagggaaaagtcgatagaaacaaaagatgacagatgttgcaattaataatcaaagactttgaagtcactactatgagcctgtttaaggaactgaaggaaaagatggacataataaaagaataggtaaatctcagtaggtaaatagaaacagtacaatatctgaaaaaagtagactggacattgcagaaaaagttggtgagggcttagtgatctctaaaacaacaataagcaatctggtgtatatgaaattggagtcacaggagaataaagagattgaggaagaaaaattttaagataaataaagctgaacatgttgcaagtattgaaaactaagttaacagatccaaaaggcccaacaaacctcaagcaggggaaacacaaagggaaccactgctaagcacatcaaatttagatggctgaaagtaaaagatccagagaattttaacagaaagcaaatgggaaagggcacattacatactaggagaaaataataagaatatgcatttacttgtttgcagatatagtgcaagttgtagggcaatgggtgacatcttcaaagaggtaaaaggaaaaacgattctgtatgaagcaagaatacccttcacaaaagaaggaagtagaaaaactttcaggtaaacaaaatctaagaattggtcaccaacaaatttgcactctaagaaatgttaaaggaggttcttcaggctagaagaaaataataccagatagaaacgttaaatgtccgctttaaaaacgaggagcatggccgggcacggtggcttacacctctaatcccagcactttgggaggctgaggcaggcagatcacctgaggtggggagtttgagactagcctgaccaacatggagaaaccccgtctctactaaaaatacaaaaaattagctgagagtggtggcgcatgcctgtggtcccagctactctggaggctgaggcaggagaatcgcttgaacctgggaggtggaggtcgtggtgagctgaggtcacgccactgcactccagcctgggcaacaagagtgaaactctgtcaaaaaaaaaaaaaaaaaaaaaaagcatcaaaatggcaaacaaagataaaagattttttctcatttctaaattttctaaaagataatttaaagtaagcacaaggtattatgggaactgtaacaggtcaaagtaaattataggataaccatacacagaagatagaaggaagttaaatggagcttcactgtgataaagttactacattttgaaataatatgaattcatggtagactgagaacttaaggatgcatatgataatctccagagtaatgacttaaaaggggtactaaaaagctaaaagaagagataaaatggaatattaaatagtactaaattatccaaaataagtcagaaaaggaagaaaaaggaacaaagaacatatagtaccaacaacgagatggtagacaaacccagtaatatcaataattgcattggatgaaaatgtacacaacattttagttaaaagatagaaattgtcagactaaataaaaatttaagatgctataaagacatggattaaaaataaaaaatggatgaactgtactaatccacacaagttggactttagtataaggaacatttccagaaatagggacatttcagaaatagacattttattctcataaaaaggtcaattcactgagaagacacaatgatcctaaatgtgttggcacctaaatacagcttgagagtacatgaagcaaaagttgttaaaattaagtggagaaattgataaatctagaaacatagatgaaaatttgtatcattccttctcaataattactaggttaaaaacagcaaatatagataatatctagattatatttagattggttaataaattcagccaacttgacctaattgatatttataaaatactgtgttcaataattgcggaatacacattcttttcagagcacgtggaacattcaccgacatagaccatatcttggccatgaaagtctcattacctctcgattgaaattttacaaagtatctttgttctaatggcagtagatttaaaacagaagccaataacaggctgtttataaaccttcccaaatgtttggaaattaaataacctataactcaaaaaataataaaaattagaaaatactttgaaactgataaaatccaactgggaaattgtatgatccgttgaatgcagtgcttggagggacatttatagctatatcagtaaggaagaaaggtttaaactcagtagttctacatttccatctactaatctagaaaaagaagaccaaataagtccaaggtaagtagaaaaaagaataacagaagtaaataaaatagaaaacacaaattataaagttatttagaaagcgtaataaaaattgataaatctctaacaaaactaatcaaaaaaggaaaaagagcaaattaccagttttataaatgaaagaggagataccacagatattacagacattaaaataataagagaataaacttggtaacttaggagaaacaggcaaattccttgaaatacacagcctaccaagaaataaattgggagagtcctatatttgcctttttaaatggaattcagaatcgcaaacagaatcgcaaacagaatcttctctcaatcttctctcaaagaaaattagaagcctagatgaggtcaaaagtgaattatgtcagccgatttagaaaaaaattataccatccctagaaattctttcaggtagtaaagttggagggagcatttcccaactcatgaggccaaaatctcaataccaaaactttacaaagacataataagcacagtgtccttcattaatttggacacaaaaattctcaaatattagcaaatagaatatagcaggatgaaaggaataatatctcatggccaagtgggatttatgccagaaataagttgattcaccattggaaaatcaaataatttaccatattaatagaatgaaagaggaaatcatacgatcacctcagtaaatgcagacattactaacaatattctataatgatttctaataactctcagcaaactaagaatatgcaaaaacttcctcagcctgaaaaaaaaactatagctgacaacatacttattggtgaaagactcaatcttttcttcttaagattaggaacaaagtaaccatttttctatcttcttttattcaatgttttattgaaagtctgaaggtaagacaaagagataaaaggcagaaagattggaaagaaagaaaaaactatttctatttacagacataattgtctacatagaaagtcccaataattgaaccaaaaacctgctagaattaataaatgagtatagcagggtgacaggatacaaagtcagtatacaaaattccattttattcctgtatacaagctgcaggtgttgaaaatgaaattttaaaaaattaccatcaaaaattatttacaatagcattcctaataggaatgaatataagaaaagatatggaagacctctacactgaaaactacaaaacactgattagtaaaattacaatgatctaaataaatgaagatataccatgcccatggattgaaagactcaatattgttaagatgtccatttttctctatgcattgaatgttgtcccatttataaatctcaatagcctttcttttagaaactgacaagcttattctaaaactaatatataattgcaaatgacctctaatgaaaacaatcataaaaaataaagaaggagggcttatactgctgatttcaaaatttactgtaaagctgtaataaatacaatgtttgacataaagatagatgactagaataactgaatggaataacaaattcagaaattcctttatatgttcaattgctttttgataaaggtgctagataattcagtggagaaaggatactctttttagttaaaaaaaaaaaaataagctggagaaactgggtatctgcaaaaagtgtgatgctcaggtcataccagacacaaacattaaacttgaaatcgatcatagatctaattaaaaagctaaacatataaatattttctaaatagatttctgctcttcaaagactagaaatttaaagggaaaccacactgggagaaaatacaacacttacatctgtgtatctagaatatgtgaagaactcttaacaactagataatagatgagcaactcaaaaattggcaaaacatactttacacaagaatgtatatgagtagccagtaagtacacattaaagatgttctatgtcataaaccatcagggaagtacaagttaagaaactgctacatagatagtacaatagctaaaatcaaaaagactatttccaagtgtcaccaagagtacagagcaactgatatgctcatacattgtttatagaaacataaaatgatacaactactttagcaaagtttgtcagtatctcataaagttaaacatatactcaccatatggccaagcaattccatttctagtatttgcccaagagaaatgaaaatctatgtctacaaaatgactagtacatgagcactcatagagccttattcatagtagcccctgtggggctgttggaagcttcagtctccacagactcggccttgggtggaggtccgcccagctggggtgaggcagtgatctggctgcgagctgtgccaccctggcctgtggggtctctgctggctgagggattactggtttctctgttgtagtgaggggagcacaaaggcaggggtcagaagtgctggcccgtgtgcttgctctgtacttacagaggcatgacttctttggtcagtatacttcacgtttccaaatcaaggctttttcttcctaaaattggagcgccccatctctgacttttctcacagagccatcctaataaccaaggagagaaatggatgggaagggcctggataaacgggaagacctttccaagtatgtgggagctccacactggcctggttgtgtcctcctcctcggaggtcatttctgtgagctggaaaagtcatctcatttgcagtctggatgtttatctgcacttctctccagggcctcacatccttccaagacctggagcggcacttggcgcattagcctgatttctctaagtctgactgtcatgagtttggttttgggttcagggataaaacattaatccacagtgaacccatcattccttcgaatttctgctttaaaataaatcttggtttaagttgcctgctggcagttttgggcctctgagtcttggagacccttgctgtgtctgaaggattttaagtcagtgggtgagagtacaccacctgctgagaggtgtactgtccccagaggcccacctgtccttaaatcatggactattacttacaaacaggcccacagacacatgccaagaattccagggcccagtgtagattccagcagctgcactctgtccccctttggctatcagtcaaggatgtttcagcgtcaaacctgtacctatcagtatgccctaggagcacagcagagggttggcaagtcagagggcctcacccaaggaagctgggctccagttgggcattgaaggatggacaggattcgttaggatggtaaagaaaggaagcaagttgtcaggagagtgggacctggtgcctcctgcctgtcggaaccagtgagtgcaatggtgaggctgccagggtgctccgtgctggctggtgagcagtgggcagagcagatgtgcagttgggaatacccactgagagaggcagggtttttttttttttctttaagctgcgggagctgtcagagtgtttgaaataaggtgatggttgacagctgtgcctggaaggtaaagctgccacctcccagagtgcagtggagttaggagagcctgggggctgggggctgggggctgcagggatggggtctgcatggaggtgcagaggtggagatggaagtgaaggtatagatgtgggagtttgttgtggctcgtgcctctcagataagaagaggtctctggattttgattgtcaagtctggggatgtggattgtatgagagaatttttcttttttcttttctttttaaaaatattttttatagagacaggtcttgctctgtcacccaggcagcagtgcaatggtgcgattgtagctcattgcagcctcaaatttctgggctcaagcaatcctcccacttcaccctcccaagtagctgggactacaggcatatgccaccatgcccagctaattttaaaactattttttgtagaaacaggatctctctatgttgcctggctggtctcaggttctggcctcaagctatcctcctgccttggcttctcaaagccctggaattacaggtatgagccactgcacccggctagatttttttttaattgcttataatcctgtgctttattcagtttattttaatcatctccactactttgatgaggtaagtgttctttgcctcagtttacagatgaggaaatcaagactcagggaggtttatcaattttctcaaaatttacacagctagtaagtagttaaactaggaattaaatctagatctgtctgtctccagagcccaagctgcttttctcgtcagttggaagctggttctaagtctggtgagaggaaacccgctgtgggaccctgtcttcccagcctgggtctgtgctcgtacatcctcagctgctgtattctcaaagctctatgctttgtcgtttttgtttttgttttctcttcctgaaattaattacccaatgctgagtggaacaatgggatacagaggcttcagagaaattggtttagttttcctcttgaatctgcttttggacaagtctcatttgagctcaggtggtccttttgggtcctgttgctggagggtggatctctcagtctctgagcccagccctggggtgtggtgctctgccccttgttctccgtcagccaagtctgggtgctctgggaaggtacttcccacccaccgtgcctttcagtgggcactccccctgcggggggatcttctctatccctctcctctctagatgcagctcacagggtggtttccgtggcctgcgagtgggatttgggctgaatttcctacagtgactgctttagggatatgccagtagggggttcaatttcagccccttccttgggtccacagtgctcctccacagtgggaacccctagcagctctgaacagcagatccagcctcgagcttattctggcagtgtaaccaggcccttcacacagcaaactgtagtgacatgtcagtagcacatgccctgcggttgctggtgccttcaaaagtgttcattttaggtggttctgccaccctcccaagccagacttcatgtgcacatcttccttattttttcttgaaaaactggaatctgacaagtctagcagagtgtgtttatgaagtgacttcttaagtagcagtatttgaaacctgtcatgaagatatgtgatgatattggtttggctcatgtgattaagtgatctgtttcgttcagagagagtgatggcagaaaagagagcccatggttttgaagaatacctcttttttttttttttggggggagatggagtcttgctcttggagtacaatggcgcgatctcagctcactgcaacttccgcctcctgggttcaagagattctcctgcctcagcctcccaagtagttgggattacaggtgcacaccactacgcctggctaatttttgtatttttagtagaaatggggtttccctatgttggccaggctggtgttgagctcctgacctcaggtgatctgcccgtctcggcctcccaattgaagaatacctcttaaaacatgtttaagttttaaaaagattgaaacaaagtctgtaacttttagcatgcaaccttcatggattctcatcattgggaaaaattttctactggaagcattggcatgtcttttgtagccatggaaactaacccttcaaagagagagaagctcttctatcctcaaacaaggagatacagtgaaaggaaggcatatttcatactcagatgcctgaaatactttatttctgtgtgagtgtgtgtgtgtgtatatatgtaatatatatattgcagatatatattacatatataatatatatattacatatataatatatatattacatatataatatatattacatataatatatatattatatctataatatatatattacatatataatatatattatatattatatctataatatatattacatatataatatataatatatattatatatattacatataatatatattatatatattacatatattatatataatatatattatatatattatatatatattttaaggcttatacaagactcctgcttgtttttgtttatcaatggcacgatgggtgtagttttaggtgattgaagttacatatgcactgtggccaaatacacccagtacaaagcccaaagttgcatgtctttgatcctcattagtgtaaagtccatgtttgtgaaagcaattatttaggtgatttttatcgagcaactactaatggccggggtttgtgataaggaaccagtatacaaagataagacagacacagcccctccttaacagagtttacagtctggtaagttaaagaaaatagtgaaaaaccaattgcaggactgtgaagtaaattctgcaaaagcggagttctaatctggaggactctaaggtagagaaaagtctttatgtcttgagccagccgagtgggatagtatctggaagagcaggaggggttatgcaggcaacagcatgcacagtggcctggtgttgaaagagctccatgccttggaggaactgagtgaactttaggatgtctagagtacacagttcaagggggaagaggtcagaaaggaggcaggagagatctgacatgaccagataggtggtgcattccttcactccatccctaccgcactctcctgctcagggtaagtgccacatgtaaacagttaggtttggtctgtgcagggtggcccagctgctaattcctgtgttctgttcatggtggataactcaacctagtcattaaaagctaggaaacaccgactctgaaaatgattcatcttcccaaaagatgaaaactgttttaaacatcatcaccgtcttttatgtcaatgaaagcatcaacaaccctggctgggcacagtggctcacgcctgttttcccagcactatgggaggctgaggcgggtggatcccttgaggccagaagtttgagactgccctggccagcatagagaaaccctgtctactaaaaatattaaaaaattagctggacatggtggcgcacacctgtaattccagctgcttgggaggctgaggcacaagaattgcttgaacccaggaggtggagggcatgccactgcactccagcctgggcagccgagcccagaccctgtctcaaaactaaaagtaaaaatagaaatgtgattgtcaaatgtttttcttcaacatattttactgtgtaaacaagggacccccattttctcgtcctttttgcccaccagcggttcccatgcatttcttggcagctgtgtttcatgactgctgctggagaatgctgtcccaggccagctgtcttccccccacagacattacctgcaaaggagcaggtcttatttatggggtgctgtattcctaatccctccccaccccactctgcctattggtctcatgcagagagaacatcctttggctatcaccagcttttcatggttgagggaaaaatggaacaaatacaatgcttttgatgaactatgagctgagccagtgccaatgattaaaaattttttaaattgtgaaacatcacacattgctgttattttttttttttttttttacaaaattcctagtttccttgaacagaaactgaacctttatgctttccaagaagttatatttaaacaaaaaagttctttgaatcaaactacatttgcattctgtttcatttccttcatgtctatgtagaggaaataatttaggtctaaagaaggctggactcccctgataaaaatcagtgggttacttcttcaacttcccccttctctttgcctttataagtgttgcctttgtttttttctgaatttctgagccttctgttttactaaaaatctgagtccctagtgattttcgtggcagttttcaatggaggttatgttgttttttgctttgtttcgagggttttttgttttgttttgttttttgcatgtgtatgtaaatatcaaagtgttttgtttgtttaaattttatgtgggtctaattaaaacagatagcattgcaacacaagaaaaaaaaatcctgtatctaaatcaagatgacttccagtggcccatttattttatgggacgtttaagaaataaaagttcccacagcaaactgcgtgtcctcttgcatctgcggcagtcccattccacctgcacctctgtttgtgtgtgatggctggctgcagcctgggcgtgctgtctccagtagtgttggctgagccaggggtccaggagatcaggatgtcagggcctgtaaatcctggggcatgtgagtgtctggtggcctctctgcagaacatgaggcgtgtgcccagcccgtgggggctccactggggctccttagatggaggctggctgggtctggggcaaggggttctctccctggagtggtgcttactgagtgggagtgagggacagcaggtggagagatgagcggaaagggggctgtcacctttctctgtcctgagttggggctcttggggaaaatcagagtgcagtagtgagcagagctgggctttatgccctgtcctccctccctggtcctgattcatgacctccccgtgagccacagccccacggaagggacgtaggatttggagcctggttagtaacgctgttgttctgttgactgggcatatgatgtgggccagcaacaatgcctcgttgagcctccgtgttggcctttgtgaaatggatgtgaaaatcctcctcctgcctcttccactgaggttgtgagcagcccagggggcagtgaatgtaaagacatttggaggactctaggaacaatctaaataaatgaggggcttttttctgttattgttagagaaggggacatggcagagactcaggctgttttgccaaaacccaggtcgctttccccagctgtgcaggctcgtattctgctgaagctgctgttggttattcctgggaccctgggcgatgcagtcacaggtgaaggaccctgggcgatgcagtcacagtggggtgggctcaggctgtgcttgtttcagagacgattttggcttgttctgctgtgtttgtctattccatctaaaggtcttttgggggctggatgagtatggggcgcataccattgttctgtcgtcagagcgccctgcagccatttctcgtgaactcactcagcacttatgcttcttgggtgtcaatgccaccaaactacttggctgccaggtccaagagcgtgccaggctgttgcccagggaaagaaatgggcaacaaaaaatggactaagtcacagcagtcaggtccccgtggaggaggtgctggggaggctggagtcgcagcagcagctgaaaggtctttagaacgtgctgtgatctggtgtcgctgccgagtcattagtccatctctactgaggatccctgtctggggaagttgctgcatcccagggcaactgtgctgaaatcagttgtcttatttcaaaacttgtgcctgtgccctgagaccctcagcaggcatccttcttccttcatatggcagcccttcagatactggggaccagcctctcttctccatccctcctcctgccccgcccagcccgtccttcttccctgaacaggtggacaagaaatgttcatgtggcagatggggtgtcacggggccctgacaaggaaggtccacatgaggggagatgattacactggtgtgctagacccaggggactggtgtggaaagggcagaggtgacagtgaccgtagcatggtggtggttgggggtcagtgacaggcgtcataggtgtttttccaaatagtcgtgtaagaaagttggggcttcatgagaagtgtgtttttgaccacattggtattgatgttaaatccaacccatcacccagtgcttactgaatgtctctggtcttcctcagcaccattttcttcttattttcattttctgttcacgcataacacctgtgaaagctgataggagtcctatcaaatttctgtctgttcctccttgcctacagagaagcaatccaggttccttagttttgtatttaagcccctttctggactgacaggaagcctgttttcgttagtttttttgtttgtttgattgtttttgagacaaggtctctgtctgtcacccaggctgcagtgcagtggtacagtcacagctcactgcaacctcaacctcccaggctcgggtgatcctcctgcctcagcctcctgagtagctgagaccacaggtgcatgccattgcacttggctaacttaaaaaaaattattttgtagagatggggtctcactctgttgcccatgctggtctcgaactcctggcctcaagcaatcctcccaccatcacctcccaaaatgttggtatttcaggcgtgagcctctgtgtctggccttgtagcctggttttgatcctcatcctcctggtgtctaccttctccttcctctgctcctgcttttccttccaggcatcgtgttgaggtgcttagggtagattcagcagctgcatggccttgtgtgcccacgtgctgtgagcctcagtgtctatacaagagggtgatagcagcccctgcctccccatagtcactcaccagcggggatggggtaaggtgttgctctgggctctggttaggttgcaaggctgagggggccacccagggtaggggacacatgtattcatgttttggtgctcaatgagtagagttttctggtgaattagaggcaggcagaatgcatttggatggggtaagccagagaatgtgtcaccaaaagcatgagacttgagcttggtcttgaaaggtgcactggattcaaagatgggagaaggctgcccaggtggatggaattctgtagacaaaagctcacagggttgcggaattgagaagagtgtggccagagtataaggtgtgcatttataggatgggtgaataaggctggaatagcacttgggagaaggctggaaggccttgagtggcaggcagaagcatctgaccttcatccttgagggaggcaacaaggagctgtgagacattctgagtaggatgccaccagggggaagtctgggtctgcagcgacctggagcagagagggaagcaagctctgatgaaatgctctggccgcagctcctgtggctgcccagggaatgggtgtgtgcagacaggcctgcataagacacttcacagctgtcctgttaggctgttagggagattccttactgagtaattgcttctcaaccaggagataaaagggaatatcttaatgacctagagacagaagatctaccacatgaggcctgaacacaataagggaaaatggcgagctggccgtggaggctgctccagatgatatgtctagttttgggcacactcatttcatgcttctgggcgatcccagcaattgtgggctttctgtcctatagggacattttctggcctcctgaaggagtaggagtagggcttgttttgttggatacaattttttgtacatagccttcctgcatgcctatatgaagtggcgccaaggggaaatagagacatgggaagaaatacatgagaaatggacagacaacattgtccgttcctgcctgcaaggagcttacagtctagctggtaagctgaaatgaatatgtaatagcatgaatttgaatttggttagtagtggagttatatcttctaagcattcaaatttttttctatttggaaataatttcaaatatatagaacaaccccaagaatagaaatagcacagtgaataatccatgtaccccttaccccagttcacctaatattaaattttacctcatttactttttcatttgttatctatccataagacatgtggactgatttttaaaaatattttataatttattactgtccttagttatttcagtgctcaaatttcctaagatttggctagtaggagctacttctctagctcctgtatccttatgacatatctccataatgtgttttggtttgtttttgttttttgagcacttccttattttcttcatcttgtacctaccctacccttgccctggaatcacccagttctccaaagtcccctggttccttttaatggggaatgttattagagaccaagatgtgggtaccaggtgtgcttgtacctgccagagcatctttgcttctaagtcctttcaacaggcagacctaggaaatatatgcatttccgtacacatattcatacacatacttacattgatacatacacatactcacatatcagcctcttttaaaaatcagacattggaaatcagactttaaaataaacatcttttagaaatcatcagttcacacctataccttcaattccagcctgtccccagagggttcttctctgttccgtgtttctgtgtccctccttccacagcgagaactctggctcccagcagcattagcacatgtactcactggctaaatcctgtaatatgtctaagatagtttcagaatggtctcatccacatcactgcaaaaaacaaagctactgaaaagagttcagcatttgtttgtagttcatccctcactccaatcctacccaagactgagagtatgtcgtcaaatattcatgagctatttgaattagttttgtctttctccttcagtctggttatggtattcatttgaattacagatttgtttgtttcaaatcactttcagtttaggggtattttcccttcatctcatccttactgacttaatttttaaaaatttaaggtgaagaacattaacatggttcccaaagtcaaaactatagaaaaaggtatacttaagagtgtcactccaaccttgattcctttggcctaattcattcccatcccttgttttctgctctttcttttagatacacctgagagaaatatgctccttttatttcccagtttttcgtgtgtaaagggtagcacactttattgctttttttttttttttcatccaggcacttcttatttatcttttgatcagacacaccataaccaaaattctggtttggaacaagaagactcctagcatataacagttgttggatttttagtcacttgcaaaagtctgttggtttctaccaatagctttattaaataagctttgtaaaacaatctcttagtaataggattcttagaatatgatgaattcttatgcaaagtggagtaacttttttcccatcattgcaaagtttgatagaaggtgcctcggacttgaggtgtgattttcaggatcagagggtcagttgtgatgggaatgggttattctcaactgagcagatagtgtacaggattggcagtgggtttgccagctcattgcgatcactctgagccttgggacccatgtgtccttctatgtgtctcccaatcctaacgggtttgtggcagcttagagcccattcacagctagtgctaatttttctccctttgataatttgagaaagctcttccatttgccttttgaatgtctctcttatgtctggattcaacaactattatacatttgaacttcacgttgataccactctttgtgttttcaaagccttactgaatgtcttgcttaattcctgtgaaacagcggaacaggtattgttgtgtctgtttggaagtgaggaaactgaagctcagaacacagcagtgacagagctaggactagaagccaggtcttcagacgaagagcccagagtggtgtaggagggccaaggatttatctgggtttatcacagggactctacctccctgcccccttcctccatcctgccctgtggccaacagatttctactgtataaacctcacctctgtccacatcaataaataataccttcctgctaaatattcagccattcagaactgtctaaaatcagttcagagggtctatatcagcagctttgttatatgagcttttgtgatagtgaccatcattgtgagtgggccataaaccaggacttggcagggttttttactcctaggaattttagtcagagtagagttttacttatgcctgcttacctgtgtcccagcagtggaaaatgtacaacagtgatgcagcttgttagaaatgggatttttatatttgtaatgttaaaaaggcataaaatattacaaaagaaaattaggaagatagnnnnnnnnnnnnnnnnnnnnnnnnnnnnnnnnnnnnnnnnnnnnnnnnnnnnnnnnnnnnnnnnnnnnnnnnnnnnnnnnnnnnnnnnnnnnnnnnnnnnnnnnnnnnnnnnnnnnnnnnnnnnnnnnnnnnnnnnnnnnnnngtagaagttagttcatcaatggacgttcattttataatgtatgtaattatacattataaaatgtatataattatataatttaaaaataaaatataattatataattataatacattataaaatgtatataatgtatgtaattatgcattataaaatgaatgtccttaagcttctcagggtaactcttttactatcttcataatttttttcccaagaacccatatatgatatggacccaaagtaagaataccttgtttgtatgtaaccatctgaatttagtattctaagttcggaatcaaaacatgcaaacagatttgtactaggatacttttctggtgaataatagaactgaaggtccacttttctttgagatgtatttaagaaaacagattatataattcattttcctgcagatacatgacatgccaagccctcttactgttgctcagggatgtgattctggattgagttgtgattttttcagagttcagagaatcatttggtgaatttacctagagctgagttatgtatttcccatgtgtcaggaaaccccggaggcctagaaaccccaaaccattctcagggtgtggtacatgtgaatggcgagacactggagtccttacttctttgagacagcaggtgttctttgggctgggaggtcagagcacgtgtctgggctcagatcggctcctgctcactctctagatccacaaagcctggcctccttccttattcacagggggtggagtggagactgacagccctaacaggaccaaggataggttccagggagtctggaaagtggggtgatttagaagctatgagagggatcctttctttttcttttctttttttttttcctttctttctttcttttttatttttatttttattttttttgagatggagtcttgctccgttgcccaggctggagtgcaatggtgcaatctcagcccgccgcaacctctgtctgagtgggattctttctaattgtgggcagagggtggcacttggtgaggattccagtttcttatctgaagtattagtgtcactgggtgtgcaagcatctgttcagcccctcgacagcctagagttaagagacgggtgtgaatatggggttagttttgttgttgttgttattattattattattattttggagacagcgtcttgctctgttgcccaggctggaatgcagtggcatgaacttggctcactgcaacctctgcctcccaggttcaagcaattctcttgcctcagcctcctgagtaactgggactgcaccaccatgcccagctaattctttttattttagtagagatggggtttcaccatgttgaccaggctggtctcaaactcctgacctcatgatccacccaccttggcttcccaaagtgctgggattacaggcgtgagccaccgtgcctggctggggttagctttatgaaagcaggtcacttccccattcgtgggttgggttgggttgagttgggttgggttggcttatcgaggtaggaccctgaaagagacatgctggctttgactcggaacaaaggcaagaaggcagacagaagtaacctgtgtcagaatctcaaggtctgtgtgcagaaactgcattgctgtaacctcacctgcttccttggcagctttttactaagtctctaactcacatatcttggctcctataacaactcacggttggagatgcagatggttcctcatatataaaaattgggtaatcgtccacctgactctcaggcttgcctgagtatgtggggttttgtatatatgcatagtcagaggcttgcacacatggtggaaagtagcataaacaccccacaattgggaacatttacctgtctgccagatcttttccagggcaggtgttcctataaatgggcagaaaatcatatgcctcttcccctcctgcagggaagacttttggggaagaccatgacaagtagcaggggttaagaaaaacagtaatgcttcatcagtgctcgagttcccatctgggaagggagaactgggttgtggagggggtggggactgccctgactccatgcactgctctggcccgaacctgcaggtgatgggtagaggagcctagtgtgggcaccagcaaggactgctgcctgctcagagctcttggtttggacaaaaggggtagcacacaatattaatgcaaagtttgtccaaaagcattgaagaagttctaaacttggtactctttgaccacagcttggcccatttgggtccctcctctttgaggaggctctggggaaagtggggcgtctctgagttcaggccccttgttggggggtgtcagaggcctgccatgacagcacatggtgttttgggcctaggccccttgagatcgctgtcatcgaggggagttcattttctaagaaatgatgcatgtgtgttggtgtgggctctgcgactctgacccccatagtcttgctttggaagacactgtcttctgtcctgtccaagtgtgtggctccattgctgtgctcatgtgactatactcagtgctgtgtgtcctgcccacaagactgttgtgcagtagggcagtggctcaggatgcaggtccccaaggatgtcctgatatgtgcttgtcctctttgcctccttcagagaattctcaaaggaaagagagaaggcaaaagcacggggagatttccagaagctccgggagaagcagcagctggaggaggatctaaagggctacttggattggatcacccaagctgaggacatcgatccggagaatgaggaagaaggaggagaggaaggcaaacgaaatagtatgtagcgcctttcctgcccctggctagacagacccagtgtgcggttcagacgcctagcagtaggccttcctcgactctgacccaggctgtgagtgggacagcctcctcccagccatctggtcccttctgcctgcacacatcacggagagaacaggtgcattggtgctgactctggatttctgcctgaggtttggggtttagagttgtatttggtaaggtggctttatagccaaggaaggtcaaacggacccactgttggcctgggaaattcagtaagcgcatttctgtgcgggcacaggggtgatgagacacatattcttgtaccacaggagaagaagctgtggtttccctcacctcagagtgaacagtgttattggacaagaatttgaagtgcagggttcctcttgactcttactcttaggccacctgacatggctcctacatgtgctattcatatgaagccatatgcttagcccatcaggggctgggaggaaaccggctcaccattctaggcaggtgttaaggggcacgtgagtcagtgacagctgctttgctgtcacccatcgacaccccacactgtgacactaagcaccctagagcaccttctgcaggaggcaaggcctgagaactcagtccatcactgacattaattgccattgtcaaccacggtgtctctttcactgcatacttttcccacagatgcgctcttattctctctggggccctttgtgcctcgggtcagagtggaaactggaatccagcaatgcatttgactgagatgtctgtgacttgcttcaaatctagaagagttggataggaaggaccaagaacgtacttcaagtgcacatgtccattgagaggcctggggacccgaggccggccctacgttgtagaagatggccgagcaagtccctgcttgagcagagcgccttggatgttttgctctcagcaaggcctgttgctgggtacaggggaaacccagagctggagaggatgtggagtgctgcctcctagggagagacaggcctgtcacactaaatgcagccctggggagcagagctgcagggcacacatagagggcaggcaccgccgacgagggatcgaggacagggctggagggagcatttggcctgggccctgaaggatggatggattgcaggtgtgaccattcagtgtcagaagaagcaccctgacccaggggactagcgtgagggaggcgtggaggtggacaaaggccaggtttcagggaggaagcagtgggcccttcagctggagcacagagggtatgaaggtcggggtgagctgccataggaagggtgggtgaggtgcaattgtgcctcttctggaggttgtggagtgtgtaagtgggggctgagagacccctggtggagaggcttcttgactgagagggcccttacctttcttcaagcctgggctctgtgcctccatggggagggagtgtgttccgtgatctcagatgccctggctggtgcaaaccagtgtgctgactgggagtgggcagggtcaggcctctcttctctccctccctgcttcttgccaggctcaggaaggggccaggactttagcacctgaggatcagaagactgagggagggtttctagagctaactgtttgctgaatgcaagttcagagtttataaatagacattcatgtgagtctcagactcagcgatgtgcctatgaagtgatcagatgtaagagtgtctgcctgtcctctgcacagctctccccttggcagttgagccaacgtgaaccccatggctttcgtggagcttctgcacctgcagtatggcaacaggccatgtaggtgcagcttggagatgcctgcaccgctcttttccccttcacttgcaaactgtaactcagatgctgacctgccccatctcccctaaacccaacatgttatttgtaaacgagaggaggtatggcccctttttctcagcagagtgtctttctttgctagtttagctgtgtcccccagggagctgagtgaggccttcttacaggccagtggcctttcctctgtttatttctcctcctctagaagtagacaaggtttcgtgttctagtgttgctaacattagtcgtggtagagttgtttatagggcctatgatttgaggattaagggttttcattggatttaaggtgatatcttgagggttaaccattttatctcagcccagcatttcctatgacctatcactgtaaaaacctgatgatgacagaaatcaatgactctgcctttcagagaacttgccatgaggggaagatggagaaggagtggcttagtgtgagaagctgatcccattgttaaggcccagcactctgctgtgtgagcccaggagggcgcgatgattctggctggtgggagtgggcaggctggggcgatgtgaggaaggctccgtgggaggagcagccctgggcggcagaggttgggggtgggggctttttcaagctggggaaatggcacaaacaaggtgtgcgaagtgacaaatattcagggcccttaagtgcattgctcagtaatataatctaggaaagaaacaaaacctgtttaaaagccttgtagatcttcagaattcactctcactggggctcccaagcccataaagctgcaatgtgtcttgggaacatcagcagtattgtttctgctatgcaccgtgatgtgtgactcaaaatgattaactagcttaacgtttgatccagaatagcaaatatttctgtggtgcgcccttgttctttatggagctcgttttgccaggtgctggggtttcctgtggagtgaggctcacagtgcttcccgagtcatcagatttccagagccttgctgatgagggttttaaataaagacagaaatcttggctgtggaggccatgatgggatttagctgacttgagagcaccaagtctcctcctcctctgaggagagaacctctctgatcacagacctcagcagcccagaccctctggaggagacagcactgttgaggtttccctggggcctcctgtggctgccagccattttcttcctgtcacagccagaaaaccacacaaggagagggtttcagtgaggcccacatggtcctcctcaccaaataaacagtcctggattcaccacatgcacatgccaggtctggggctgtctctgtgcatctgattagcaggcagtagaaatgtgggtgttgccagtgttacggtgtctgcatcctccctgggggtgtgagatcaccccacgtgccttccactccaaccctgctcctctgttacctcttgagaggaggatggcgcagggcccgggctcctgactttgtccataatggctaaggatgctaattcaactgagagcccttttcagctgggtcctggatgtgagttgagcagtttcctcccagaccttgaggattgaagtgacagtgtgagaagaaatgcttcctgatagccgagcctcagcctagatgagcagaagtgggtgtaggaagtcattaataacagcagatgtctgtgagctcacaggaggcaaaggcttgggctggagggcatcttgatgccccttctccggatgtggctgcaatggagttttgtgacttggaatttggactttagtattaggcaaattactcaacctctctggaccccactttccttgtctgcaagaaggggataaagatatatctccccatggggctgttgtgacaattgaacgttctgtgactgctaggagtagtcatagttgtagtatgtgctgctgctgttttcatcagacaccagtaaaagttgacctcaacagaattttaggggtataaatttagggggtacaaataccgttctgtgacatggacatattacatagcggtgaagtctgggcttttagtgtaaccatcacccgaaaagtgtacattatacccagtaagtaatttctcatccctcatgcctcttccaccctcccacccttctgtgtctccaatgcctattattccatccacaccctatgtccatgtgtacacattatttagcttctgcttatcagtgagaatatgcagtatttgactttcctaaacataatatttttgaaggttctcctagaccgctaaccagcctcagggtggggcctccctcttaggaccattgccctgtgcttttctgttcagaaactataaagttctgaagtattgatggaaaacaaatctgttaactaggtcactttcgagatagggcagcacagctttcaggctcttgaagtccatttctagtttggcggtgcttgctgtcagggaacagatgtcaaatcaagtacttggagatgcgctcacattatcttttctctctgatctgctaaatgtcactgcatgcgtctgcgatgcccaacactggctgtacgttataatcacctggggagcttggatgcttcttgatgccatactccaccctctaagactcttgattaatcttggggtgggagccaggggtggctctttttcattaaggttccctggggattctaatgtgaagctagggttcagaactcctgagtccaggatgctatcagtggctgaatatcacactgttccaggcattcacttgaaagaagaggagaggcaatcaggcctctaactgagctgtctggtgactggtgacaggtagctccagctttgtgcattcatagaatatttaaaatgtcaatttcataaatttgctattagaaagctggtgttacacaattaactgaatggacaaaattccctttgaagtgagttcctgagcatttggtaaattttcaaggataatttatttaactttttgctgagcttcaagtttcttaagaaaccctgccaaatctcaaagtgatttttttagacatatgcagctgcttctgagttaacaatggagttttgctaggaccattaaaatctggaagcctaaaattctattttaaactcttctcattgtcagtgattagtcttaaaaaaaaaaagcattaaaaatgaaatcattttaaagggagctcattctaaaattctggccagaaaagcagggcaattttattgtaggaactattaatgattaataattcctctaagtaaagatatttgatgcccaaagaaagggaggggcatacctgaaacttcatctctgaccacaagggcagcctctctgtcttctgcttcttcagtggtcctggaggctatgggcactgcccctgcctgcccggggactctgccaccctggggcttggtggagcaggttgccctagctgcctctcttttgcatgtgctacctagttgcctcttactgcaatgtttgctttgggggtggacagaaaaccaggacgttatagctggttgcaagcataaggcatagcaatttgctggtcctgttttgaaagactgtgttttgaaattttgatttacaaaactgctttcatcaccattgaactacctcaaggcacaagttcaaaatggaagatactcaattaaaagctgtaaagcaaacagcagcagttagagtggcatacggtaaatatgcgtccaggtcaagagccctcactggagaggcagctggaagtgctttcactgggaagtgggagggctgactcaggggctggccctagggtcagtggctggacactgtctccattggggtggcactgggagtagttgtctggacaggcagactctctccacaggggtgatagaaagcagtggtaatttctaaaagtgcctgcatgtctgccatcaccttcagcctcctaagagctgatgggagctggactcagggactgttgccccactgtggagacaaggagtgggtactccagccaagtttgcagtctcaaatcagggttgttttatttgtttttaatacattttaattatggaagtaatatttgcctacataaaaaattcatgtaatttcaaagtatataaagtaagaaaaaaattctctcttccttctccttaaagagaggcagacttagaagtttggggcctctacttccccacctcactgcacataatacatgacacagaccgcatgcatatagcttccaccctaagatgcccaacacaggtatttttcactgaaccatgtaccacagatatttcccatgtttttaaagcaaaatgttggctcttttcaataaattgccattataaaaactgctacaatggactatgcactctacagcacgtggacctctactttatagaggtctctccaccatgagaccatcagctccatgggtgcagcaggaatagggtctgtttctgccctctgttgtgtggctgcacccagcacagtgcttgtcccatacatgagcatgccattacttccttcttgaatgaaagaacatagagtaataataactagcatttgtcaggtgctttctgtgtgtgagacactgttccaaaggctgtgggtgaatacattcattcttcttcacacaactctgtgagacaggaacttgacagatggggaaactaaagcacaaagcagttcagtagcttcccaaggccatgtgacttacgtggcaaagctgggatttgaacccaagctctgccacagtctgcaggctaactatcattaacccctgcaaacacatgcccctgtgtctgcgtgctcgtgttcatggttttgtgggagaggatacaagaaaagggtctgctgtgtcagaaaggatgcacattttaggaacgtgagtattctgcctacccatagtgtgcaggtgtctgtgctgcccatgcccttgcttactccagcattcctgctgctgtctcacactgcttcgcacaaccctcccctagagcacagggtccgtactctaaagactagctggcttagagtgatcatggaatcatggggctgcaaggggttaaagatcctagagtcatttctctcgtgacctggtggtcatgggagagtcgtagtgatgacagtagtggtggttgattgtgccttgccaaagctgggcacattgcttttattactgtctccactgttcacctcttacaacaaccttacgcagtacaggtccaattattattgacatcttacaggtgtggaggaaactaaggcttcacagtatcaggtaacctgtccacagtcttctgacatggaagtgacagggctggggttagacctggcctgtcagagtccagagcccaccttttgaactcccacctgtcctgtcccatatggtagtgctgtttggaatcacatatccagtctgtacagggctcctgactccccctaaagtgccttttccttaataccctacttagatgggaagccaaaccctggaaacctttatctagcatgggttagctggttgttgatttagaacaggttcttaaagacaggtgtttgtgtaatagctgtggaaagggcacttcctctccgctgttctgatgctgagctggattcctagcaggaggggtctggggcaggcgggcgtccattgcgtgaggcaacctggctggcagggctggccgcgtggggccctggtttggctgctgttgctgccctctgctgcttcataatgaaattgcctgtgttcaacctgaaggggtcacagtggccgacttgcttaaagaggataagaagaaaaagaagttttgctgctttcggcaacgcagggctaaagatcatggtaaattgctgagactgagctttctttttccgcaacatctctgataccttttccttgcacataggcattgtgtgaagtgcatgtgccgtgtggtgtgttcagaagatgcctatattttaattgcttgatttctttcttcttgtctttttccaaaataatgtgcccttaccaagatagcattgcagttttctttttgtttgaactgtaccttataaagaagcagctgaaccaactcaaaaaatgtacttgattcggcatgaatattcttagactggaaggcagacttttaaaatacttttccccaaatgatttttttaaatttaaaccgtttagaaattccaataatgttatttgattgatttttttttctccaggctacatgtttcaaattgcttctctgtcttttagtctctggctactttgcccaggactatgccaaagctagtagtggcagctttaagaatgaaattagctggatgcagtggctcacacctgtaattccagcactttaggaagccgaggcaggaggatcacttgaagccaggagtttgagactagcctgggcaacaaagtgagaccctgtgtctaccaaaaattgtaaacaaagaagcaaacaaaaaaatcaggtgtggtggtgcatgcctatagtccccagctacttgggaggctgaggcaagaggattgcataagcccaggagttcgaggctgcagtcagcgatattgcgccattacactccagcctgggtaacagagtgcgatctctgtctcttaaaaaataaaaataaataaaaatagacttcagggatgcaaagatttgggggcacttgcctttgaaagtgagaatgggctcgtgtgggaaagttatatttccagatatgtcctaaaatgatgctaaacatacccttcctcagaatccctggagtagctgtcaggcccatccccaggcagacagttaggtgagcagctggctccctgccttgctctgcccaagtcatggcagtggttcgacagcagcacaaagctttgcctatgcacaccagcacagtcgacccagttctgccaccaggatcggccctggtcacctgactctggggaaagtctgtttaaggagattcagaccgcagggacgtgaagccaacaactaagggaacagaggggacacactgtactcttttctttgaagtggcctctggccccatgggaatgctgagctgagaggttatgggacgcagatgggaacaacccgtggatatctgaagagggttatattagagtctaggtctcatcagaaggcctaaaagtgaaaaggaattaagagattatcagatataagcccttgtcattcagcacgttgtggaccccaaaggagggagaagaggaggtggaacttgcctgaggtgggacagtgagttaggggcagagttggggctgccttttttatctgtagcattcacggaaggtttatgaacaggaggctgggcttgatgcagcacctgaaggtgtctgcaagaagaatggccttcagctaagcaggaaatagtgtcatggacataagaaaaaacatctttaaagactgacatagggatatagctctggagaggttaccaaaaggagataaatgatttctgtccccagaaaagaaaacacccctccttggttctgccttgctgaatgcaggcttgggccttgtgattctttaaggattcttgtgccttctccattgtctttctgagatctgcagggagaggaagcaggctgacacatttaaggaactttattttgagtgggaatggctttttattgactgaaatacctggggactcaggaaggactccgaccctgctggcaccaggtggggcacgagccctcatatggatgctgggctgcccctgtccctgaacacgcggagatagttattgtctgggcataattcttgcttgagacatggaaaccttggtctggccttgacctccattctccaagaagagcctggcttctttacagcagcaagaggctgttactctgtggtggcctaatgtgtctctactagcatgtgcatgtgcctttagggggtgtgtgggcttcttctggatttggcaggcctgtacgtcatggtactgctcatgtttgtcatgaaaataagatgaaaacatgaggtctaggtgtcaggtaccctgtcccctaggaaggcagccacaactcagccactgctcagttgtccagcctcaccccctacccttacctttgaaaagaatgagaagctttaggctgcttggaggtggaaggaaatgctaaaataaattcctgagtgtgcaaaaaagtctgtcctgtggagaacagaggagtgaggctctgaggccaaagacatctgtgaatgaggctactaatgggacaggttctagacgaggctggagggctctgggctcagtttgatgtgtggcaagccttcccttcggggtgccttgactggaggactgaggctctcctgtgacgccctgaggcctctggggagctactgcttcctgtgctgcaccccattctctgggacattctacatgcagagcacttggactcagttctccagtgcaggctgctggctggacccctggcttccctcctgagggtggtgggcaggggctcacttcttgtgccctcccctccttgcagagctgggggaatgcaagggaaaccccctggttgttggtagtaaaaccagccagcatgtgggcgtttctgccttcctgcagttatagcaggtcagaggtaaatggatcttagagatgatactgtcctacaactcatcttacagatctggtagccaagcataggggaaaagaggcacttgtcccattgtcacctgatgataagcaccaggctttcctgacatttcttccatcatttttgacctcatcagcctccatcactgaaggttgatctgagattttgctatacctgttaatggtgaacataattttgaggctgcctgcttaggacccacacatagactcatttgctctgtgtgtatgtgtgtgtgtgtgtgtgtgtgtgtgtgtgtgtgtgtgtgtgagagatttgcctccaaattcacaagcctgacacatttggctgagacgaatgtcgtccttcagcatgagagtagatggataaatgtctacaccttggtgaaaatgctagttgtgcttacctgagaagcagcagatttccctggtttactgtgtgtggcattgcccatgataacatctggcccagtgcaagatcttaaagagaagcaccatgacccacatccacagagtgctccaagtaggggcctggcccggctgcccatgctgcaaaggccttggaaactctaattacagtctgggacatgcagggctgctgtctgccaccatcctctcacccccagtggcacccaggccccccgccaccaatctcagtgcaccacactgtaagcctaagggtctgccctggagctcttcccagagatcccaatgcctggaatagattgcaaaatataggccttgagcttctccagattttcagcaggcaaattgcagtgccagcatcctctcacaggtcacaggctttcctaatgcttggtttttcccagactcactgaaagtagtttttaaatttatataaaaaataaacttctctaacaaagctctaacattccagtttcctgaaatgtgtcagggaagaggcttcacagcttgttcatgtgcagatggcccctggtgcttatttctacagtaggggactggcacttgtcggcaatgtggggaggtctgaggggtctgcctgcacctctaataaggcctagccacttgtcagcaattaacactgaatccctgctgaaggggacaaggccatcacctaaatggggcagtcacaatgctatggaagccagttaggagaagcccatgtattcgggtaatttgcccatggctttaccttcatgagtttgtatgactctttctgtctggatttttataaaagcccagtcgtcaccattgcagcctgatttttgtgctgtcgtcggtcactgagctgatatcctgtaagtgatctggttatatgccagattttgagtggttaataaaggtcatcagaatagtaaaccagcactggtagataatagactcgtttggctttttggaacttgttgatttgtggaattttaagtacataacaccaaaatgtataccagtgaaaccacagtacatacttgaaaagaatggtgagtggaagttaggagagatttctcagtgtcagctgtgtgtcccaaggcattttggcgagttctgtcctctgagaaatcaagagtttgctcacgtattctcagaagccccttctggttctaacagtctatgattcttttctttattttttaaaaacatagatgagatcctattggggctaaaggaagggaaagtcatattaattttttaacattaaaaaaatgaatgcctaatgcaagtgaagggtaaaatgctttatttttaataaatgaggtctttgttatacccactgagcctgatcttttcaaatatttttggaaaaggataagtgtgatatttcttctggaaatattttggaaaaggatcctgtgatagggagtaagtggctggagaaggtaggctgccagggccctggtcagagtgcgtttcctctgcccagatttaggggctggatcaagggctgtttccaggaccaaatgaggtctccaatttctagcgtaggcactgtcctctttctttccgtctgcctctgctcatcctcagccctggcaacatctttttgggatatatttatttattatgtgcctgtggctctttaggtgtcaaacaactatgacaggagaagttgctatgcctacagtaggcaaagttagacaataactcagctaaagacagagaaaatacaaaccaagaatgatggccaaagctgattcagaggtatggaagatggctcacactagatgcgtctgtgcaatgatgaaagtggccagggcaaaatgacactggattggtcgctttgcttccagggagctccaggagagcttttctgagatgatggagttaacatgtgtgggcctcactgatcatccagccctggggacccagcactccgcatgcctcatctcattcttacccttttacaggtgaggcaatggagatgtacagaagtcaggtcacaaacgcggggttaaacttagatctggccaacctctgcacctgctctcagccactatcccaacccagctgaaggacagaatcagctcagagagcaggaggaccctgcctcaccctcagtggagccctggcacagtgctgtgagactatcttcccctctttgttgctgtttggggagttcggttttacttcttgtctttccccacagttagtctagggagcaactagaacatttcatacactaatagttggcagggggccagaaatgctaactgatgaccccattcccatagaaaatatgtaatttatctgtttcaatcagattgtttttaaaatgaagctttagaattgaaatgctgcaactgtaccgatatcagcatgagacatgactccagagattaaaaagccacaaagacttagtcttttcagaagtttgctcttttgaaaataatgactaatgttcctacatgattaatattagaactatgagatagcaaactgttaaagatggaaatgaccctcaagattgtggagttcacaccaccattttagagacaggaaagtgaagcctggagagaggtgatccattgcccaggagactcagaaaacaggaccaggcctgtgggttccccacatcatactgccctcaactcctggtcccctcagtcactgcagtaaccaccacggaaaatgccgcacagagttaactcatgatcagatgtgaaaagggtctcccactgtgattttctttgttggatttaacaacctcctcacctttctgctgaatcagagtgaggaacagtcgaggagaattgcatgagtagcttcttgtgtgtctgtgtgtgttaatggagtttttttttttaaggtttttccatgattagagtcgtattttttgtttgtttttgtccagttttttttgtttgtttgtttctgcatgaaataatgaaaaagtaaatcaaggtttgtaattggtttcttctgacttaggaaagaagaaaattattctatgagagtaccagcaatgtaacatgagtctataattttactcacttggtcttaacttttgacacccttgcctcagtgttcctgggcatggcgtggaggctcccatgcaggcaggctcagtttctcgggcactcacaagcggaacggatcagggatcttctttggtatcctcaagaaacttctcagaccactgggttccttgagccaggttccacctctatccctgctgttacctttatgaagtctgctatgagcaaggcgggccgaacacagccccctacgcgagctgcctgatccagctcctttccccctgagcctgggctgggcctcagaatcttcgccatagcgcttccagcccactaccagtatttgcagatgaaacttgaggcatccttgctaaggggagccacacgggcagagcccatgggccaagctttcctgaagacatcgtaaggtctgtaaaaacagtcactacagttcaaagccatgcctcaggaaaaaggaagtacacgtggattctcttccgtgacttcctcttttacctctgcaccccggcagaattaatccttctttactctggaacctcctgcacagacccctgaggtagctctcttcacagctgatggaagtgagctgggggctgcctgtccctcacccctattccaggtgggtgcagtgctgtgtgccctctttttgcccctgccctcctccactgcctgggctccagcacgtgttcgtgatgtttatggggttgaatcaagtggatgagaaaagacgctcgtgcaccagatggtggccctgggtggaccctggacctccacacactagtgggcgtgtttccacatttcctctacttccgctcaggatcctaccatggagaagtgggatgggcccagagaccctagtcatactgagaccagagtcaaccttgccctctgctcactggttgataatgatcttcttcttccactcgtaacactataattccttggtgctctagttgttcttacccagcttactgggtaagaactttctgcgtattggcttcacaagctcagcagaacttcagcatcaggtaaaatagcaaaaaaatagagttcttaactctaaaaaatgttgtgcatggtaccttcatgcactgccttccccattcacaatagctcttctccctcagtatatttaagatgattgactcatgaaatgttagggttattcacagatgttctatatgcaccttttggggcaagcaaagatgtacctgtaaagtacattttggtggcttctcagtgtgatcccagagatgaggaggataaagtggtgctatacccagccacaggattcactttgatcccttagcttcctttcttggaaatgtctagggggatagaatgtcctcctcgagggggactgtgttccctacaggccatgggtgcagagactcgcctgcagtggagatgcctggctccttggcactcccttagcccagctgaggccctgagggcccttttcaccctcctcctgggttccggaggtctgcctggtggcagaggctcccacctggcctgcctcccaggcgtgcagtgtgccccgcatgctctctgaagcccgtcttctccccacagctagcatgcccaccagcgagactgagtctgtgaacacagagaacgtcagcggtgaaggcgagaaccgaggctgctgtggaagtctctggtgagtgtggggagcacttgccctctttcccctcctgttgtctcagagaagcaggtggtgaggaagaccgcccaggctgcagcagagccccgggccatcgccttgggtgtggcgggtgggaaggctcctcgtaccccacgccacgcttcctcctgtgccagggctatccctcctgcacacctccccaccccccgcccccccgccccccggcccagcatttcacatgcctcttcctgtaagtagagcccgtgaagaatgtggtggttaacctggccacctgctgtgtccattaggtgctggtggagacggagaggcgcggccaaggcggggccctctgggtgtcggcggtgggggtaaaggcctgattctccttccagcctgggtttggcatttgtgcttttgaagaagagcttctgtggcagagttgctgactagaatgtgctacgtatttaagttttcctttgctcatgggaccttcctaacctcaggcctggcggttggatgacgaggccctgccttcttggtgcctggcactttttccctggagccctgcaccagcctctcctcatgatggaaggcaccattgcattaacactcactggcttttttctagatgatttgggctgtggcagctggcgggggggctgggggggaccagcagtgcagaatgtgctgggcactgtctgccgtgggggagccctgtgcggtttggttttgtttgcttcttgctggtatccttcaggtcttatctctgtaaagtgcaggtgtcatttttaagagaactcaatcttactcttggcagagtttcataaaaatgatgtgttatgggcagaatatgcaaccatttgtgaagtgattttgcctccattctcttgctctgccctctctgagacatcatgaagcagacagagaatgggtttgtcatccccactttacagatgagaatgctgaggcccaagacctgctgctttcccatactcacccagtgggagaatggcagtgctgggactcctagtgcagtgctccctctgcggtagtagcagcaaatgctgctgtcgagatgagtggcaggagagactctgctgccttcattttggcccctgcatcactgcctgctgccagggcctgcagggaatctggccgagtcttccctgacctgggcctcgagggtgctcagtctgctcctctggccctggcagcatcctaatttctgctctggccttgcccctgctggcctgctgtggtaaccaggggtgctaagtccaggctgtatgcatggcttttatgatatctcagctgaaatgatggggagtgtgtgctcaagccctcggaaccagaatcttaacactttttgtctttctttcagtcaagccatctcaaaatccaaactcaggtcagtatcttctttctgtttcttcgtcagcctgtgtgttgcctttgtatgttctcacttctgaattttacgtagtattgctctggacttgagttttcctctgtggattataacattgatactgaattgcagtcagtcaattgaatcctatgagcctggcttagggggagatcttaggtgccaaagatctccctcaaagtaaaccaataagactcagtaacgagttttgcctccccattaatcctccttatcctctgagtcattttcctaagagagctgctgcttgtcacttttctgctcgaaagctttccatagaaagggagttcaagaagtcttccaaggtactagcatttcttgatgtgcatgcgggttacgtgttcagttggtaaaactcattgaaccatatacctatgattagtgtactttttcatctgagtgtcatttttcaacaaaaacattttcctactatatataaacactaacttaaaataggcaaagacctaaatataaaatataaaatcatgaacattccagaaagaaaacaggagaaagtctttgtgatcttgagttatgcaaaggtttcttaagatacaacacccagtatactttctgtaacagaaaacaaacagataaattggtctttgtcaaaattaaacttctgttcttcaaaagaaaagaaaaaggttagcttcagacttggagaaaaatatttgcaaagcatatttgataaaggactggtatcccatatatataaagattaatgcataaaggagagtgtcaataatagaaaaacccaataaaaaatgggcaaaatttttaataggcatttcaccagagaagagatgtggatggcagataagcacatgaaatgaccatcagttgttacaaaaatgcacattaaaatcacagttagataccactacacatctattagagtgaatcagatttaaatatctgacaatgacaagttctgacaaggatgctgattggtgggaactttcatacagtgttgatggacatgtcaaatgacacagccgttaaaaaaatagtttggtagttcctcataaagtttaaacatatatttaccacgtttatatttggcccagccatcccacttctaaggtgtttgtataagagaaatgaagatatatgcctacatacaaagttgtaacatgaatgtttgtaccagttttattcatgcttaccccaagctggaagtaacccaaaggtccatcaaatgtgaatgggtagacacactgtggttcaccagtatgatggagtactagttcatgtctgctgagttatgcatcctaggagaaacccagctgtgagcgggacagtctttagtgtccttagtagagtttttccacgctggccaacatgttagaagctgctctttccattggaacctgcacagcaagagtaataataaaatacaccttacttgatccaggttttggtaaagagttggcacaactctttctctgctcacttcctgggttacagattttctttttgcctagcaacacagctgagtcagccagggctgcagcttgggtagcctggagattcctcttgactcaggcccccagaggaagtaccccattgtcgttagtgaggcagcacagcctggagaggactgactttaccaattggctgacctttccacgggatctgggtcactgagctgcagctcatggcacactttaccaaagcatccccttgtggcagggaaggttttctagaaggagacaggctaagggagagaatattttctctaatcacaatcaggaactgaaggtaggtggaggacatgctacttgtctgtttggctgagctcattttatttttatgaaaacacgattcaatattggctcttctcctaaaggtatattttgagcatcactagttagaaagggcacctgatgactcagtatgaagattcatgtcctactcagctttgacaactctgccaggctctggaggaacctcagagatttaagaaaggattgaaaaggttccctttaaaaaaaaaaaaactagctttgtagcactttgctgcctggtaaattctgtatggtgattgagatgctgcaagagatgtgtataataagcgaagtggctctctgcactgattgcatgagcagatccacgtcccatatggtggatataggaactgcatatgtgtgcaagtgtagttttgcatctgcacgtgaatctatgaatatctagattttctaacccacttaagggctgcatatgacagattctggagttatctataagccataaggaaggactgatagcatgatcaagtcaagattatacttttaaaagtcgcattttaagaccaacataatttttatgatgaagtctgttaatttctgtgccatttgtgctcatctttctttcctgcactcccaccccaatctagacctccagagtgaaagccaaattatctctcaatcatatttattggatactcagatgctgtatctgtcatctacgtagtaatgtttgcttgtcttttagccgacgctggcgtcgctggaaccgattcaatcgcagaagatgtagggccgccgtgaagtctgtcacgttttactggctggttatcgtcctggtgtttctgaacaccttaaccatttcctctgagcactacaatcagccagattggttgacacagattcaaggtacaagcagaggccattccttttttgttctgaactagagatttctgtggctgtccaactgccatttggtcttatctgatcgctgcatgatgaagtatcgcaacatttctagtgaggacaaacttggtagaaccatccagacacagcaactaccagagcgagggtgccatctgtgccgcgtggtgaagcaccttggagccacttaatgccaagcatctaattgtcctaaccctgagccaacctaggaccaagaattcttgaagctggaagggacctcgtaatccctgctccctgccctcatcggggaagcttcattttcccctatagtacttctggcaaatggttttggttcccctgctttgaatgctccagcactggggtgtgggacactcatccctagagacagcccattctgggtttgacagttttgagcctttgaaaagtccttcctttcatccagtcaaacccgtttccctctacctctccagcctgcttggtgatattttcagctgttagaaatgacattgataggtgactgcttctgatatcgtcatgccataaatgaattcagacagatcttttctgtgtgattgaatgaaaaaatatgtataacctgatggtgtcaacgcagaatcgtaggcttttagggctggaaggcgtcagagattatgtgatgagctgccccttcccattttgtcatcagtgacactgagacctggagaaatcaagtaacttctccagagtcacacacatagctagtagcagaagcaggaccagaacctggtggacagactgtccacgcgaaggccacgtttctgtcctgagtgaggtagtgaagagagagacaaggtattggcgtatttcctgtggggcctgatagggagggaggtgtgaggggcacgagcagtctgagtgtcttgcaggagaccctgaggatgggtgcccctttgtctttccagatattgccaacaaagtcctcttggctctgttcacctgcgagatgctggtaaaaatgtacagcttgggcctccaagcatatttcgtctctcttttcaaccggtttgattgcttcgtggtgtgtggtggaatcactgagacgatcttggtggaactggaaatcatgtctcccctggggatctctgtgtttcggtgtgtgcgcctcttaagaatcttcaaagtgaccaggtaaggaaatgtgggtcccactgcaaatgttttatgaacatgaggcggcaaccagtcacatccccgggcaggtgatgttctgctctgtcctgcatgggtgttctgagctgacaccctcatcttgacttataggcactggacttccctgagcaacttagtggcatccttattaaactccatgaagtccatcgcttcgctgttgcttctgctttttctcttcattatcatcttttccttgcttgggatgcagctgtttggcggcaagtttaattttgatgaaacgcaaaccaagcggagcacctttgacaatttccctcaagcacttctcacagtgttccaggtgagtcctccctccattccccgaaaagcacttcgtgagcagcagctaaaactcctctgccttcttgtctgctcacactcaggaagacaaaaggactccatttttgttcatctctgccctaatcatagcctggtaaattttgtgccatttaagttattcgttctgcatcatcctccagctgtctatcttaagtgatgtaatttttttaaagacttctagctacattacaaaataataaaccaaaaaaaccgtttttcacactcaagctcttccaagaaaactttttgattgattttatgaggtttctttgaaatagactctaaaattcttttctctttggtactttttgatggcaggccagttcataatcctagttataatagatttacacaagaagtgaattctcatgcctccatgctttggtgtgtagttggaggaatcagagtggtaggaactgtggcagccattggtcccttctgtcctcctcctgggatgcagtgaggacacaaagattctgagggtgcctgtcctgtggggcctctgcaggcagtagctgagaagggagcggtggttgcagagaggcaccgatggctctgctgctcagagcagcagcacatgctcccctgactctacgctgaggtgctcaaaaccctcctccttggacagggtctgatggagaagtttaaaagacccacctgtcctcattgcttttcctgtgtgatgtgagctgcagagccctgccagagaggaaaggcagcagacagctgggtcctgtggtggccctttccatgcccagctctctgctgtggatgagtcacttacccatttctgaagaaatccagagaccaaagggaatgatctggacaattctctcccacttggtcattttcaggtatatataatctgctgtaagccatagtattgttgtttgaattatacttaaattttggctgctgatcagtgattcttttttaaaaaaaaatttctttcagagaaactggtgtctttttttttttttttggtaatgcatgcatatggcacaaaattctaatgttacaaatgaataataattctcccagccagccacaaatttcctcttctaggaagcaaccaccattaaacagtttcttgtgaattcttagatctgcattttctgatagctacaactcagttaagctacctataggagactttccacagacaggagctcactgtacgtgctgttttgcatcttgcttttatcactttgagtgtcctcaagagccttcctgcttggtccataaaaggctgcccctcctttgaaacgctgcgtccatgcggtggtagatgtgccgttgttcatatgaccagtcccttgctgacaagcattgagttctgtctggtcttagcccacatacacagggctccagtaggtgaccctgaacacgcatcagagggcacatgtgttggctgtagatctgtgggataaactcccagagatggaattgctgctttagagggtgtgtccattttaaatgttgacacacgtgcccaagtgctctccttatggttgtattagctcattgtcttcacactgcccattgcctcactgcctctcccctcagtggagagcatgctttgggatgcccatcagttaggtgaaaatggcatttcattgtacttttaaaagatactgttcttatcaggagtgaggttgaacgtcttttcctatgactcagagccatcagtagtgccttttctgtgaattactttatcttttcaaatcatttgcccatttttgtttggttgtgatccataacagtttaaattttaaaaatatctagttcagattgaagataaaggagctctgtctgtcgtcggaagatagcatttttttcattactgttcttattcatctgattctatttcatcatggattgaattatcaagtatgatcagtagagaagattaaatttcaggtcattggtgatatctactcttgaggtagttttgtaaatttacatgagacatttagaatttcctgcttctgtaatttcataggtataattatccatttccacagttgatggactatgtggaatgctatgcagcagttaaaagaatgagatgcaccttctgacacagagggtctccagagtatgttgttgaatgaaaaaacaagccagttgcagaaaactttgcatagcatgatatcctttatgtctgaaaactcagagaagacacctagtgcttgttttctttgtgtgtaaacgtgtttaaatctgtagttgaaggttccagagagacacagaaagagcatgctttctggggaagggactaaaactgggctggggtgtaatcaaaaagcacataaatcttggctgggtgaggtggctcatgcctgtaatcccagcactttgggaggctgaagtgggcggaacacttgaggtcaggagttcgagaccagcctggccaacgtgctgtaacactctctctactaaaaatataaaaattagccgagtgtggtggtggtcacctgtaatcccagctacttgaaaggctgaggcaggagagttgcttgaaccggggaggtggaggttgcagtgagctgagatcaagccactgcactccagcctggcaatagagcgagactccatctcaaaaacaaacaaacacttaagtcttaataataaggttattttttttcactcaaagaattatctatttgtgtaattaaaaaacagtgttttagaaattccatgggataacagatggatttgttcagtgcaaactggactgtgaaaggcagcttaaaccagatctaggcagccaccgaggggctctaagagagcggctgcaatttgtgaatccacctgctggctgataccagtttggcttctcagatcctgacaggcgaagactggaatgctgtgatgtacgatggcatcatggcttacgggggcccatcctcttcaggaatgatcgtctgcatctacttcatcatcctcttcatttgtggtaactgtatccttcaagccgaccaggctttgttgttgccgtcgttatctggttttgtttttcttcctctgcatttctctgtggtgatggtggtggtagtagttgtggcagggaggtaaatgcctttaccttattagctcaatatctgcttttcttccatgctgctgggggacagcgtcctgtaagcagaattccagagaggctttgagggatgcgctctggctaagagaagcaagcccagggaaggagcgtgagacagcacacatactggtcccagaggtcactcagtttggcatcatgtctcctgtacaggtcccgagggatggctgagcgcaaggccaggtggttctttatgttatcattattgggagcttaggcgtccatctgtgacttcctaagacccttcgtgactgatgagagccatctttgtggactgatctgtgctcccctgggctaatttcactttgctgatctgtccatctttgcggatcaagtgtccattggctagctgctaaatcatgctgcataacttctctctgccttactttaccccttttccctgtcgagaggcaccctctaatcctagacttctggaattggcccttagatctgtatttacctcattcagacccttcctgatcctatagcctttggttctcggtgttttatctccaggtcctccatgcctagcaccagacctggtacacagaggcctttaatgaatgtttgatgcatgaacgacgtacacactcatgatactacatctgggttttcacccttccattttaaaaggtcctaatctggattctgcttctaaggtggcccagatctctgtaggtgttttcttctttatcttgtctggctcactgataaattttcttcagtgtggtaacctcagtgcaaacctgcccccttttctacaaggacaatgctttgtgctataaggtattttataaaaaccccatctcaacacatatacatccttgtagtcccttgactcggctctaaggccccctccacaagagccacccctgccctgtctcccacccagagaaggttcttctacctctgagctccccctcagattttatccacgtctcttactgcctgtaggttcttctgtctactggatttttatttatttattattattattttatagaaggagtctcactctgtcacgcaggctggatggagtgcagtggtgcaatctcggctcactgcaacctccgcctcctgggttcaagtgattctcctgcctcagcctcctgagtagctgggattacatgtgtgcaccaccatgcccagctaatttttgcatttttagtagagatggggtttctccatgttaaccaggccggtctaaaactcctgacctcaggtgatccgcccgccttggcctcccaaagtgctgggattacaggtgtgagccactgcgcccggcctgtctactggaattttgagtgggcattcctccatctccctaactagatggataagcttcttgagtcaggaatctttttgtattcacatctctcaatagagtacaggatcttgcacatagttggcccttggtaaatgaaaggtcattattttctttttctgctgtcctatggttgactctttaggccacagcaacatcctggacttgaatctgcagagaagtattccctggtgcttgtctgtggttgcatgttgttttctttatagcacatgccactgtatcagaggtgcttagggagctgcttatgctctgtcttccccaactagagtagacattccagtgtgtggtgtttcttcctgtgccctcagcacccacaacagtgcctgacacattggaggtacttggtagatctttctggatgaattccagagcatgccactctttaggagggtctgagtaatgcctctcaatacagatgatggattttgctctggaaagttgttacaagcttgtaagatcttcctgtggctcatcactctggatttgctttccactacccaaaggagttgagtgtcatggcaagactagagagattattgtttcttcactgagatcatggagggaatactcagtacagctagtctcatcactagcccctgtccgagttaccattaccccaggcctagcagaggaatgctcatgttaccaagccatctccagcccaggactaattgcttcctgaggctcattgcagctccagttaaaaaataggccagcatgtcaaaggctttttgagtcttaatgtaattcacttacgtttctctcctctttaaaaccttgaatagattagtcaggcgtgctattccctcacagagatttcatcatctgttccttgttaggttatgttggtttacgtgttcagcaacccatccaagacaacaaattgcacagggcgtatgggacagtgctatgctgctcctgtctcggggtctctgggctcctgcagttttgcctgcagatggccgggcatcaggcagagagaagcatttgtcacagaagggggccttctcacttattgccctctcatccctgtgcttctcaaaaacatgcttcactgctagtgggtaagaaacaggcatcttctgatttaggagtcttgttcagaatacttgttaaaaacaaaaacattcaagaaagccatgtatacaacattagagtaagagtgaaaaaatatgataatttgttcagtcacctaaccttttattgtgttttttaactggaactgcaatgagcctcgggaagcaatttgtcctgggctggagagggcaaaaatcaagttcaggtacagtgatcaaagatcgagctgcagtgagactattcacaacagtccagcaccaggtggcagtaagtcagacacattatagtcagtcagtgtttgtggagtgaaggaatgaatgagttatctgtagactctgaaggttatttcaaaggagaaagtctcatactgtcttgtgcaagggcatcatcatttgaataacttgcaacctttgaagtggtctgttttggaaagcactcccctgaatatatatgttgtagttgtagtatgtgtttaaaaaaaaaacccaaactactttttaattataccatgtttatgttatagattgttttataaaatgtataacatagctatagatacgtagatgtttggacacacacacacacagagaaaggttgaaattagtgggttttcatgggttttagtgaatcttaattttacttctgtagactgtccttttacaggtttttacttttgttttgttttgttttgttttgttttgtttgaaaagcagggctctggtactctagttttgctgtgtgagtataacacttgggacggtcacttactaccagcttcccgggatgcagaggtgtgtggcgttgccattgttggccgcacgtagttgcatttagtagtgtgttgtgcccttaaaaagttgaaattagatattctactgaatgtcttcttggccatcgctgtagacaatttggctgatgctgaaagtctgaacactgctcagaaagaagaagcggaagaaaaggagaggaaaaagattgccaggtaaccctattttcccctgacgtgtttgtccaggggctgtgttgggagccctgcaacagttgcagcctgccaggcttacccccgcatcacggcagctgcagcccccgggttgctgctttgtggatcatggttgaccatgcactgcagaccaaaacggatggaatcttgggcagaagccaggctcttggctgtcatccctcggggctgagagtgggagtcacgtgtccccatgcttaaagaatcactgcagttaattttggtgtcataaaataaatgatgcattcaatgctgattagctctcagatgagaattttaataagatggtctgtgtaatgaatccatcgcattgagattaccaggaagctctgagtttgggttgtgctaggctcttgtggttagtgttgtttctaattaaattctgtccttcattggagcattattgattcagaatcctgattagcatttttatacagagtaacatggttatttggtttcttgtgctcttttctcttctctttagaaaagagagcctagaaaataaaaagaacaacaaaccagaagtcaaccagatagccaacagtgacaacaaggtatgtattctaagatgcttctcccctttttgtttcaaaatgatcctgttgatctccatacatgtaccatttacactgtggaagtgtcttgtgtatcattcttgtaatattttggtgtgaagaatatggcacaccatatagaccctggcttcccaggggggattctggttgaatttaggcagttagttgtgtttactgatatttcaccagaaaaccaatatgataaagaattgactagtttgaccacttatgttttctttattggaattgtgcaatcagccctgacccgtggtcaggatcacgttagcatcttctgagtgggtatgaaaatcgcggatttttaatagatgtctgtttccagaggtaatcccaggatcaggtggcctcagggctatactgtaaaactgaatcccatttatgacagccctggttgttttgttctttctctgttcatcgagttgataaatgcttactgagtggctatcatgtgtcagacactgaggattcaggaatgaagaagacaggtccctgccttcatggggctcacagtctggcaggaagacaggagtatgagatgcattatcacatggtatgagtgaatgtgctggcacagggcaaggacagagccctgaatggtgctggctaaccacgactgggtcagggttcagccttcttctcacctgccctcaggccttctgtctgaagcagaatcaccatctggggacatctgcctgtccctgcacactcaaatacagatgcagctttggggaggaatccatgccctatgctggaccaccagggtgacttttcctctctgaagtgattttaagtcagtctcccctcctcccaagacgtctttgtcatcctaggttacaattgatgactatagagaagaggatgaagacaaggacccctatccgccttgcgatgtgccaggtatggtggcggaggccggagacgctggctttgctgtgtgtctttgctactgctctgtgaccacctgccgagtctgcggccagccagcccagcagcgtgcacatgagctgctgaggccaccaaggccgtgggaccagttagctcgcctttttcccatggtcacaggcagaatgtgtcactcaaattccaggtgatggggagggaaagtgcaggtgggtcagggcagtcccagcttctgctgggagactggtccaggaggccccccggtgttagcgctcacctgacacttttatatttgactggcacatttattggctgatgtgggtgggactgtggagttgggagcctaggagctgattgagactgaaagtcccacacagtttctcaggctagtctgagcgaggaggttactggggaaacagccaggtgttgggaggttggcagtgagaatctcagcactgccacctttcatctgtggtcagatcttacgctggtgggaatctcatcattcccgcaaactaaacatgctcaccagacggggacacttctcagcaccccccacccctgcaacacacactcagtccatgttctgaaggagcaggagggttttgattcatgtaagcaggtagatgttgttaaagtttaagccaaatttgcatgtgaaattaagaataattcaaacccatatgtagtctttatttcatgcctataaaaaaagtatttcatttaaagtaggggaagaggaagaggaagaggaggaggatgaacctgaggttcctgccggaccccgtcctcgaaggatctcggagttgaacatgaaggaaaaaattgcccccatccctgaagggagcgctttcttcattcttagcaagaccaacccgtaaatactccccttctagtctctcacggctgcctcttgccagtgaccctacaggttgcttgagggtggctcgggtgggggtgaggggaagtggttcacagccctttctgaacctgagtgtccctggcgccctcacccaagtcccctccaacccctctctcctccactgttgctcttgccctcagctcatctcttcctagctgcctccttcccacaggggtgtggccaggtcctgggaggagctccattctaggttctcctccctgccttcacccctgcatggggacagcaatggggaaagccttgtccaccccagcatattccagctggagctcactgctctggtgttccatgcttcggccagccgtggaaatttttcctaatgagtggatcttctgttaggatgccttgtgggatgagaatttttgtgaccaaggtccgcatagcatcctcatcctcatagatcccccacttgattgatcagttttcccaattgagttttatctttgtaaagtcatattgcacagtgatattttatgggttgtaagtattcagttcagctctatgatagtctacttaaaatagcatttctcatgttaaaatgataaggtgctcacaaggaacagggtaatgactcacaagtactataagaggaagacgtttatttactagctagtttctaggttttaaatcatctgggactgagtggaatgccaggggaaataaatggctcctggaaaggtttctagaattgcagaagtagttcttggctgtcagagaacaactctttataattcattggccctagggagacacaggtgggaagcaaggcctgctggcatcctcagagatatgaagatgtgatggtagcttttacagctcaccactgtttgggtgttctttaaaaaaaaaaggttattaaactgatattgctgacacctacagccctttgtgtgtgtgtgtgtgtttgtgtgtgtgtgtgtgtgtgtgtgtatgtatgtatgtatgtatatgtatatatatatacatatacatatacatatatatatgtgtgtgtatatatatatatatatatatatatatatatatgttgagggaatgcatttattttcacctaaagctacaaagcactcctgccctcactagcttggaagttctttcccagactcaactgctaaccaccttcaggtcctcaggggggtacgcccagcattaaataggcccaaaagggaggacttgaagtgaggggtcgccttacataaagttgactccagtttgaaagtggaaaaaatcttttccaaggaaaagctatctatctataatagtcttatagaatacaggaatacagataggtatatatacatatacacacgtatatactttagaatttaaacatatacatacatattttagatatacatatatacacacatatactttacaatttaaatatatgtgtatacatatatttatgtgtatgttttatatatatgttttatgtgtatacatatatgtacatatacatacataaatacatacatgtgtatatgtatatgtttaaattctaaagtcaaacattgagggtatggataaccagttgctaaccaggcgcagggcacattgaggacagcagcgaggttctgatggcccagagagccatcgtttgagcccaggtgtcaggcatgagccaccctccattgcttcacgagaccacaggacttggtgagaactctcatgccgggccatgagatccttgcatgttagcaaatgatgctccaaccttcactttctgaggactgcttgtgggtcaactccaaaatttaaaaaaataataataacatctattacaaaatctgcagacagccagagatgtcctgaagtctcagttactgcaggtcactataaatagtatgaccttgcacctgcaagacaagcctgggattcatctcattctgtgtgaactgttgagggcaggcctggcctcagtttcctctctcagtcagggaagataaacagatgagtttcttgtcatagtggaaaaacttcagtgatgtagacctggatcgattctgcccctggtccttactagtgtcactttagaattctcttattaagcctcagtttccccatcttgaggaagacaacaagccccacttccaaggacttggcagagtggtctgtgtggcacccccagcacagaggtgacacaccacccacagtccacaggttgcctttggtgggcttcgagaggctgacggacaggttgctcaggtgtgccgggcagggtgcatgggcagcacagcagacagctgccctctgcctggcctcttgctgcagtggccccacactcttaaggacccagtgtgttccaccctatctgggactgtttccaagcagcggcttttccctgcaggatccgcgtaggctgccacaagctcatcaaccaccacatcttcaccaacctcatccttgtcttcatcatgctgagcagcgctgccctggccgcagaggaccccatccgcagccactccttccggaacacggtaagtccccagggtggggctcgctctgggatagccctggcctctctcgggcagaggccactgtagagatgggagctgtggaggccctcaaggtgacagctagagtaggtctttccttcagctggggacgttggctgtttccggtttgtaagtgccagagagcttgtgttttagctgggtaaatctgaatggaatcattaacttagaacttcatcttaaatactctgcaggaacagtcagtgaattcagggagcctgcttctccgcctctttgctccctgctgctgatatttaggtcctcctttccctccctgctcaggtttacactcacccctgttttgagattcatgcctcgtggaagcacacagcagggaggaagcagaattcaaaccaggcacaccacatgcccaggctgtcttgttcagggttggaggcaagatgcctatgtcgtgtagacttaaatacaccaagctgctaggctccacgactcaggagaaatacaagttagggagatgataggatgtcaagttgaggtgttcagtggagaagaacattaggccaggtgcactggctcacacctgtaattccagtgctttgggggatagagggggaggatcactgaaggacaggagttcaagactagcctgggcaacataatgagacctaatctgtacaaaaaataaaaaaaattagctgagcgtggtgtcacatacctgcagtcccagctactcaggagactgagggaggaggatcgcttgggcccaggaggtcaaagctgcagcaagcaatgtttgcaccactgcactccagcctcagtgatacagtgagaccttgtctcaaagaaaaaaaaaagaatatataatgaatgttaaaaaatttcttctctgggaagatttattataaaatatgtgattatgttatatatttcacaagtatctccaaagaaagtgctgaccttggccccagatagccaatattaagtttgagtaacttcatgaagcagagtgcaccaggcagagccacttggacccttaagcatgttaacttagcggtttacaatattacttttcattggtagaattaggaatatacaaagagttattaattggctgggcgtggtggcttatacgtataatcccagcattttgggaggccaagacagtagaatcgcttgagcccaggagttcaagactagtctaggcaacatagtgagaccccatctatataaaaatttaaaaattagccacacgtattggcacatgcctgtcccagctacttgggaggctgaggtgggaggattgcctgagcacaggaggctgagcctgaagtcagctgtgttcacaccactgtattccagcctgggtgacagagcaagaccctgtctctaaaaaaaaaaaaaaaacaaaaagaactctagattttggtgtggcagaggtggctatccagttagccctctgtatccatgggtttggcatccatggattcaaccaaccacagatagaaaatgtttgggggtggccaggcgtggtggctcacctgtaatcccagcactttgggaggccgaagtgggtggatcgcttgaggtcaggagtttgagaccagcctggccaacatggtggaaccccgtctctactaaaaataccaaaaattagccaggtgtggtggtgcacgcctgtagtcccgactactcgggaggctgaggtatgagcagtgagctgagatcgcaccactgcactccagcctgggcaacagagtaagtgagactctgtctcaaaaagaaaaaatattttgggggaaaaaatgtactgaatttgtgcagatttttttcttgtcatttcctaaataatttacatggcatttacttgaccttgggtatcttgggaaatctagagatgatctaaagtctacaggaggatgtgcatagattatatgcaaacactacaccattttatatcagagacttgagattttggggtctgagagagtcctgcaaccaatcccttatggatactgactgtactaagaaaacaagtcaagggaccgggagcagtggctcatgcctgtaatcccagtactttgggaggccaagacaggcagatcacttgaggtcaggagttcaagacctgcctggccaacatggcgaaaccccatctctactaaaaatacaaaaattagctgggtgtggtggtctgcacctgtaatcccagctatgcaggaggctgaggcaggagaatcgcttgaacccaggaggcggaggttgcagtgaactgagatcatgccattgcattccagcctctgcgacaagagcaaaactctgtctcaaaaaaacatacaaacaaaaatacaagcaagtcaagggttttctattagttagttttgtaacttagagatggtgcccgctgactgtgtctgtgttgtaaggaaacttgcacctaaattggctcttgcctcagcagccccaccttagctgtgcagcttactcggcactgaggaccattcaaaggcaagacggctagaagcagcagcctgttgactctcaggcctagatattatcgtgcagtttcaggttattaccaagaaacccgaccagcagagggaggctggcgagtgtgcaagcatcaggtgtccctggcttgctggtgggcacctttttctgagcaccaggttgttagagattttagggttaagacacacctgcagatctgtgcctccaggactctgttgggacaaccaagcctcatgctgttgcttcccatttctggagcctggcaagccctacctatcagatttatgaaacacgcactccgatatgaagagaaaaagtgctttccccatggtgcgtgttagtgtcaatataaagaggaaggcactgggcctgtcttgatttgtcctcacagattagggtttttgttagagagggtttagttgctctagatgccccaatagaagaaagacctctgtgtcatttcattccatcataaaaaaaggacacaagggcagtgtttggaaaaaaacagcattaggtgacaaactaggccaggagctagtctaggattcgcattgacaagggattaatttacatgggggtttcatgtcttatttttaattataactgcttctccataagtttatttccctgctgccttacccaaaaatgttaccgttctgcttaaatagatgtacatatgtgtatgagtattgctttttagattctgcagtgttttgtatgttttttaaccttagccgaattcttagtttaaaaaagagagcgagagaatgcaagcagagtgagggaaaaaaacagcttaaatttcaacttcagccctggcgccaggttgccttgtagacttgtgggctgcagtgtctttctgggctactagatgctttccatgttaatattcccactgtgacctaggaaggagtaaggaaaagttggctgaggcctggcagtgcacgggaagacaccttccatagcctggccaagaaactccattacacagaagtggtcccacagaattcataagtccaaaaccagaaacagtttggaaagtgaataccctctgaagagagagactgggcttgaaacagaggtcctcgcattattgtgacacagcccccaggcgactcctctacctccaacagctcacccctgtgactcttcgctggcatacgccaggcctactccttgctctgcagtgcctgtgactagctgcgtggcctatgcgtgtgtccactccctgctcccagcagccacatctgttaaaggattaggcctgggtggtctccacagtcccttctagctctggtctcttcagttctttcaaaaccatagatcatagttgtcatgaagatcagtggccaagaccaactcgcctttgcagataagggtgctacggtcagaagctcccggtgagcagctttcctggtggtcagacttcttgctgctggcccacttgcctccacggctccgaggagaagcagggaccccagaaagggctagcaggactctgctgatgggataatagatggtattgtcaccaatgaggatagagttgcctggactgaaaattcaaagaccaggtcagtctgttatttgagtgggcccagcaaggttttttaaaaaaaaccctgagtttagagagagcagtgtgagatgcagaacaacgggcaggagtgctggagaccaccaatgcaggagtctgtaaaaccatcccttgcagacttagccagcccagcgcatgagcagggaagggtgctgacgccctgattacacaggctggaatgcgagggggcatatggaagctactggctccgacagatgccgctgccatcttcatttatgcttctccaccaatctgatgctcagatggagggcaacatacttcattcagccagaaacgcggttaaaaatcgaaaatgtgtataagcctctaatttatttggtgccacaagtcgtttgtagatgtagcactctctgatgagaaaagcttgttaacaaagcactcttagaaatgagcctctctgcctgtccaagacacaagactgggaagcaagtcggtgagtggttaaaggaggtcaggattctcaaacgctctttgggaatgatgtaattgaccaaagtgggcattcacccgtggctctgcacttaccttcagaatggcagggttttcctggagggatgggtctctgactggatcgggggtttctgcctgtaagcatgcagatgtcagagtttgtctgaattccttttctcactcccacatgttgtgccttgcagatactgggttactttgactatgccttcacagccatctttactgttgagatcctgttgaaggtaatgaattttccttgatcttcacatactccacagcagctggagcaataatagttgcacttctttgtttgccttccagatgctaggttacgcagactatgtcttcactggtacttttgcatttgagatcattttaaaggtaacaggttacccggcagtgtgtttaagggctgctcctgcgtgtgacacacaggaaagaagcgtggagtgcttttgattttttatgggttttttttttgtctttcgtggttgagctaagttttttttttttgttttttaaaccgaaggatttttttttcctgtgaccattccaacttgtttttgctctttttaacctttgaatgcatgtaggagccactctggcttcatgatagtggttgagaattacattttgctcatttaaaaaaaataccctctgtaatttgtcaactgataacacatatatctctatgtgtgaacttttttccaccctttctgacatcaaagtcagaggaaaagcatttatcctatgaagaggatgtctctctttttgtttctctgactgcattatgcttttggggacctaaaatagtaacacactattttcttgcaataggatttgcaagatgacttgggtctatttgtgttaaggtattttctgtctgttttaatggatgggcttacatttacacaaaaggagcgccctttggccggggtgacctaaatgtactgcccatgcatgagctaatggctgccattgctgcttgtggtttgtggactgactgtgaagtctgccccatggggagcccattccttatgtgcttagagtgctggagaccacagcagagctccaagaacctatccaaaactggccaagaaccacagggcgtgggtcattgtggttctgggagaacgtggcccatcagaactgtcagggcaaccatctcctagcaggaagacaagctgggaaatgaagacttttaaccatggttttctttaagccattggggaatttttgtgtgtgcaattcaggcaaaatgtattttgcatcggactactgtggaacttgggctctttacaaaatcttatataaaatgaaacttcaattaatatggtcagggaatgaggtggttagttttttgaggttggtttttttatttttttattttttggttcatgaaacagcataaagccaaccaacaactgtttacccctttcttaaaagtcttctaaaaatgtgagttcattttcctgcctttaagccgatgaatttggttgacacttctcctaagtcagaggtgtgcagtgggatggtgaccagctcttgttgatgaggcctctgtgggagggcctgtggatgcagaatgcacagtggtgggggtcggagggatgccgccagaacactcaccggctcagcttctgcctcagcttcttggttttagaatttgacttcttttcaaagtgaatggggagctgttctacttagtctgttagcctggttaattgaggttttattttactctccacattttttagttgttaaatgaatatagttacccttgggctttggggaaaattagacacaggattatttaaaaggaaaaaaatgattgttactttttaatttctgtagaattgcttcaccgacttaaatcttctgagtcattcttcattttgaaggtattttagagaatggaaaataagctaaaacaagaaggattcagaaaatggagactcaccaagaagtgtctaatatctgagacgatggttcctggtggccttggggacatttggaaggctgtttggttatttgcttaagccctatgaaattgccatttttgtaggtcaaaaagggttgaacactggcgatttcataaggttcaatgtaatatttcccacctctacctctcttatactgtacttacctgagccttctccaaccttttttgttttaaaataaatagtgagctgtatatattttgctatttttactttggggaactaaactctttttccatcaccaatagaaatctcactgaagcacccataataggtgctccaggtacatgtggcaggtgagcacagagccgttgagactggctcaggtgagatgccacctggcttcctagccatgcctggcacgtgtcatcagacttggaggaattgcttaagatggatgcgtcattaaagaccattaggaacaataaggggcctctgtggaaaagtgacgtaggtccatagagcctgggagccctgaattcaagcccccactggaaaggcttaattgaaacaaggtaggctctaccagggcctcagaggggccagaaccagcgctttgtggggaagtgggctctccggacagcacttaccttttgacgaatgtagtcctgtggagcctctcttagacaggctctttggacatgccaacagtgtattcatacttgaaacctgtgatcactgtaataaagcctaaattggtttcttcttttaaaatgtatccaaaataagctggccctttttgattttggtttgaagaaattatcctgtggctcaaccccgttggtttacatttctgacttcttaatgcacacttgttaatgaagttatactttcctcaagattttgcaaagagcccaggtttcttttcctctggagacaaaaaatggtaaatcatccatgattctgcttctagatgacaacttttggagctttcctccacaaaggggccttctgcaggaactacttcaatttgctggatatgctggtggttggggtgtctctggtgtcatttgggattcagtaagtattctggggtgtgtgcccagaattgctgggctgaatggtttatgtaagggattttaacataattgataaaggctgggcatcattttcatgattatatttagttatataggtttatttaatttgctcccattccagaaagatttaaacaattcatgttttcttgtgtgtgtgtgtttttttctttttgtgcctgctgctaagttgagcttattactgtctgtgaaatttgctttcaactgaggtgaaagaagtgttgactaggagggagggaatctaggttctagtcctggttcctccaaaggctgattccagggccttgagggcatcctctctcaggaaccctgtgccccttttatataggaggggctggggccaggtggcctttcagtttttccagcttagatattgagaacttcctttgattttcaggatatagaacctgctaggactttttctttggcctcaaaatttttcagctaggagggagccaaggctgaaagtcagggccccaggtcttttccatggcatttagcgatttctggtgggaacagccattgctgagtactgcttaccatccccaggggtgtggggcagaggctccagtagagcatcaggtgtggccttgctttcttgctggcctgtgagcacttctgttcaggtgctgagcatagaatctcccctgtatgagcacacatgcacacacctgccctctaagctaaagagaagtggaaaggacctgccctcctaggaagaccaaaaacctctgcttggaacagccctttgtgttatccttctcgcctgccactgagggaaccctgtgatcatagcttggaaggccatttgcattaacatctttgcagctcctattaactcccaggctgttcatgtccaagctgcagccttgcccacttcctcctgagcatgtgttctggccacactcagccacctagggtaaagcagaaagctgcattctcttgtgtcgcatctttgtacatgctgctccctcacactggagcccccctccctattgtcctcgctaacccctactcctcctttgggactcacctggctatcaccacccccaccccagagtccttcccaggctccccctgccccacccccacaggttgtgctcccctggctgagcacaccacatttacccccgtcatgtgccacactgggttgggattgcccatctctccaccagactgtgagctccttgaaggccagagaagccctggtaccaaagtgctacagcagacctccaaccttaaacaaaaacaaatgatatatgaagcctaaaagccagctactacctagtatttacagtgagtggaaagaacaaagagagttcgtgagttgtgtctctgccaaggttagctgtgcacctgtcagcctctgtgagtgccatgggctgggcttgggaggtgctgcctcgtgtgggcggggaggagaagtcgcctctgagtcgtgaagagagatcagctcagcaccacatggatcccacgctaactgtgcagggatactaaagtgaagatccagtgaaagggtgaatctcaaagcatcctgtccatttataacacgctctgcctgccgtctttctgctccttccctagatccagtgccatctccgttgtgaagattctgagggtcttaagggtcctgcgtcccctcagggccatcaacagagcaaaaggacttaaggttttgattcctctcctccctgctgggctggcttgggttggggttggctgtaattactggctcttctgggcagagctgagctgaggcctgatggatttttaaagtgagttataaggacctttctaaccaattcagccacctgtgccaagtgctaatggcattttaaaaattattatttattgtctttatttttggtaattgaagatatttttctttgtaattattgttcatttattacctttttattagtagttctttgtgtttattttagtcttttatttagtttatttagtctttcagttttcatgtagactgtataaaaggctactgggtttctgttttcctgagtcatttatggggtggggaccctttgggcccatgtgccaggcagcactgcacctgtagcatttcttctttttttttttttctttgaaacggagtcttgctctgttgcccaggctagagtgcagtggtgtgatctcggctcactacaacctctgcctcctggggtcaagcaattcccctgcctcagcctcctcagtagctgggattacaggtgcacaccaccacgcccagctaatttttgtatttttagtacagatggggtttcaccatgttggccaggctggtctcaaactcctgacctcaagtgatctgcccacttctgcctcccaaagtgctgggattagaggtgtgagccactgtgcctggccaacacagaaactctcggctgatgttagctcacctcaaggccaaaatcacaaagaagagtcacgcccctctgccctctccgcagcacgtggtccagtgcgtcttcgtggccatccggaccatcggcaacatcatgatcgtcaccaccctcctgcagttcatgtttgcctgtatcggggtccagttgttcaaggtagaggaactgcctccaagcataaaactcaggtggatttctttaaggagaagcctgcatttacttaactgcctgtctattttatacccaggggaagttctatcgctgtacggatgaagccaaaagtaaccctgaagaatgcaggtgagcgtcctgagagtggagtaggggacttagaagagcaaatagcagacttcaaggattcacacatgttggcacgtcagaagttttggtcgtgaaataaaataggcctgtgtgctcagcttgtgggtagatagatggtgtttgtttttcattgaggtgaaattcacgtaacatcaactgttttcagtatacagttccttagcatatagtatccatggcattgttgtgcaaccaacatctctatctagttgcaaactttttgtcatcccaaaagaatggctagatggcttttgtggtggagaatctataaatgacgggagttgggggaaccctgaaataacaattatgaaatgccccaaatagcttccatgacagccatgtggatgatttccccaaatcagaatttggaactcaactccctggtgtttgggaactggctccctcttcttatacactttctagacttcctctctcctggctcctattacctacatcttggccatatttccatagacaagaactggcagaggagagacaaggtgggagatattcatgcctcccattccaggatgtccagtgaccatgaaggcagtcatggaagccattgcctaaagtttcagactgtgcagaggcctgtgtctccccacccgcgagagacataactgactgggctctggctgactgtgcctgtacattggtttggggtttattttaagcagaaggtgcagtcagagagcaccaattgcaatttggctgtgtttctgcacctccagaggcaccgttcacacaccgttcatggcgtccctggaggtgagcagcctggcattggcgtgaggacactgtttcttccctcttgaagcctctgtgtcttcatttgtaaaataaagatattgcgctttatctcttgggttccttccagaaatgaagttctgggagaaataatttgccagaaataatgcaattctttcggaaagaaaattgggaatgtcattagtaagaagagaaagggatttgattaaaactaaaatgcaggaagagtatacgtgggtttgtttcctagagcctacagagttctctatggctgagctttgatccttcagagcgcgcctcaagcccattgtgtaagagatgcactcaccatgctgtggtttttatcggccaacgacatatgcccggtgtctgggtggctgctctggagaatacacgttgcactggtagttattcaatggttatttgagccgcgaagtagattaaatggagggcgaggagaggagaaacggcgccggtgttatgctcagctgtgtgacaggcgggcggactgagtgtgacctgcctggaggttggattggggcagtgtgtccaactttacgctgcttccacctgtcatgtgtgaagccagacgacccacacctgttttcctctccaggggacttttcatcctctacaaggatggggatgttgacagtcctgtggtccgtgaacggatctggcaaaacagtgatttcaacttcgacaacgtcctctctgctatgatggcgctcttcacagtctccacgtttgagggctggcctgcgtaagtacagggagcacacagtcttctggagaggcacctgcgtgcccagggctgagccctccctcctggagtcagtcccatttctgttctccagtgtcgcaggattgccctgtggctttttaaccttgggccacttctcagtcacttcttgacccacagggcctctttctgtgtaggtggatgatttgtgaagcagggttggtagaggtgcctggcagcatctctgggtggaagcagggaggcctgagatgcctcagtcccgtgaactcccattggatgtcaggaaagctgccatccgctgctcccaaagagggtctgaatggtgtcccaaaccattcattcattcattcattcattcattcattctaatatattcccagttgcggacagttgctgttatgccatctcttttactgagcacctgctcgctcatttacagaccatgctgtgcagaggcttgtgtctccccacccgttagaaatgtctaactgggctctggctgactgcgtgcttagataccagctctgtgcaacatggcatgttaggcactgtggaggaaacagtgtctaaacatgcttcctctcctcaagcccaaatcaaatcagtgtcaagtggtcaaaccaggcaggtggtctggtgtgtcctagatgtgcagaacagggtcctgaagaatggctaagatgttgatgggtaaagtaagaagagcaggtaaggagaagttagaatttgaaagggagaatcctctgtgctttcgtgttgctctttgcttctggagctcccacccccagctcctgccatcagtgtgcaaacacacctagagtcctggatacccggtccccatgcatagatgagctgcaggaggtgggcaggctggggctcgcaggccagcagagttcttggggtgtgtgtaagagtcagatattttcaggagctcctgtaggataaagagacagtcaggtggggcttgttcattagggatttaatcctgggagaacagaggcatggagtaaggcccttcactgtgtgcaggcacaggctatagtgtcaggctttgaacactgtacttgagcaaatcatggtggcagctgaggagaaaggagcaaacctgggactcggggcttggaggaactggctcaactcctggctctgcccccaaggagtgtgactgtggcactttgatacctccctgaatattcctatgatggggatgatagtaatgtctgccttcccagatggatgtgaggattaagggagaggctgtgaaagtgtctcgggaagcctatgcatgggctgggtgccccagaagtgttgaatctgcatcagaatggggatcaatggaccccaagggtgttacagtaatccccctcttcctgttaagagttccgctaggcatagctttaattttagtgcatatctctgtttggggaagcacccttagttctttggaactactctggttggtcacttactgtcttgccagtgtgcatagttttcacttcctccagtgtcttacacgtgatattcttcctctctgaatagaaaggagtgttttaggatatttgtgaaatcttttgattttcagttcctcagaacagtccctcgatgatgatatcctgggtgccccctcctcttagtgctggctgtttgggcctgaggctgatgggagagacctggttgtgtccagcagccttggggtgggttcccagcgagtgctcatgagaggagttctggagagggaggacctgggaaggcagcgggctgggccgtgtgggctggggggcttggcaggtcctcacttggtttttctctctctaggttgctgtataaagccatcgactcgaatggagagaacatcggcccaatctacaaccaccgcgtggagatctccatcttcttcatcatctacatcatcattgtagctttcttcatgatgaacatctttgtgggctttgtcatcgttacatttcaggaacaaggagaaaaagagtataagaactgtgagctggacaaaaatcaggttaaagtcacacactgttttggcttctgtcccttggtcaggagcggagtgccttctttattgactgatttcccccatacccagagaagggcacccacatactgtctgtccctggggctagggccctgttctaagcacaccctcagcccatttgagtcatcactgctgagcgttaggtttcccgatacatatgagactttgtaattatgaaatccatcgccagacctggtggtatgaaatcagagagtgcttacgccacctgccatggtcatgacccactagtgatggctcagaatcttagttggggtgctgtggccactcacacagacattcacagtccctactgggagatggtctttaaagccacttagggcagtttcttacccttggtgctattagcatttcagtctgggatgattcttggttgtgtttcctgggctttttaggctgtttagcagcatccgtggcttccagctgttagatgccaatggttcgtcttcccctggtagcagtaaccaaaatgtctccagacattgccaagtgtcctttggggggcaaagctgccccttgttgagaactgctgaccgaggggggaataccctgcatcaccccagggaagtcagtaactttgaatttgggactaagattgtattggcatcattcttgatctgacaccgtgttttagccagtctggtagaagtaggagccttttgctcgggtgacgtggtgaggagagggagccctgtgctctgggctatcttcctacacctgcactgtgaccctaggtgccctctgatccctgctggggcttgatccctcatctctaaatcgagggcattaaggagctgctctttagagattccttgcagccctgaaagagtctacaagatcgagattcttttctgggagtttccccgggtcctctatcagtagcatctctgttttgatgacgacgtcgcaagcaagaatgatctggtagcctaggcttcctcagaggaagtggcccgggcacggcaagccaaccatagctggctgtacccactgggaaatgtgagaacatgccggtttgtgtttgcaggaagattttcctttgagttgtcagggtgtccctgtagactccaccagtgattgtcagggagaggtctggcccagcaatttgctcacccaaggaagaggagtgtcagagcaaggccaggccagccacgcagagccagcgctgaaagtgtgtcagcctctgaggtccagcacaggcttgaattgggggtccctggagtgagcatgtgaggtcagagcagcgccgggtcccagacactgggaacctgtccgaagcctgcacccagagtcaaagcaggagagcgggggtaggtctaggctctcaatgctgagctgagggctcttggggctagaggttccctctgggcctgctgcagagggtggaccagccccactacccagagtaagtgagaaagtgctccagctgggtcccaacctgtgttcaatccaattgtcactacagtgctccagctgggccctaaactgcgtccaatcaatccagctgtcgctacagtgctccagctgggccccaacctgtgttcaatccagctgtcactactgaccacatcctagggattctgaaatgaacacaacaagctccccagcccagaagctccccgatggacatgtggatagctccccataagatgtgtattgttaacacactctggctcctgaagggtatctcatgtggttccaactgggagcatccaggaggctactagtcttggggaatgagccagcccctctcgttcttgtgagtttctgtggttacttggcctcctttcctggaggacagcacaggcaggggaactataggtgtgatccacctatagatcccccgtatgtgtgataaagaggaaaggcagtgataaggcctggacccagtcctcactcctgcttgtgtatacactgcagggcctcaggaaagacagctaaaagctctgagcctcagtttttagtaagcaaaatggaagccacatgggtaggtacccagcttacccggagcttgctgggagggtcagcgaaggtaatggaggcagggccctcggtgactcaagagtggtgccagcagcaggaagggggtcactcgtaatcattttcaccatcgtccacggccccttcccgggagctgtagggtgagctctttcagagcagatgaccacggggtcctccttccctgcaagtgctcagaaccccgtttctgcccttttctgctgttgcagcgtcagtgtgttgaatacgccttgaaagcacgtcccttgcggagatacatccccaaaaacccctaccagtacaagttctggtacgtggtgaactcttcgcctttcgaatacatgatgtttgtcctcatcatgctcaacacactctgcttggccatgcaggtaaaaatggagacagccgtggggatcaggtccgggcattccgcacagccccgtgccccaaatgctgagggtggaatgctgcccctcacaggaggggtttgatttttctgatgagtctgggctataggttggccagagttctgttctggctgacagttgtcacggtaggagtttaagatagttcttttgttgaagaaattatccgtacagcatgatggtaggtaacatttccatggagcctggcattggtgctcaattctgtaaacatttaccatgggcctcctgtggccagctagtggttgagaactacagctctggagatacacagctgtttcaatcctgattttactctgaattttttgtgacttggggaaagttgtttaaattccccgaggcttgatttctttatcagtaaaatggggaaatctgtcacacctacgttagagataaggtttatgctgtagataattcccctcagacactttgttttttattttttgccttttgtttttgaggcagtctcactctgtagcccaggctggagtgcagtagcgcgatctcggctcactgcaacctccgcctcctgggttcaagtgattctcatgcctcagcattctgagtagctacgattacaggcatatgccaccatgcccagctaattttgtatttttagtagagacagggtttcaccacgttggccaggctggtcccgaactcgtgacctcaggtgatccgttgcctcagcctcccaaagtgctggtattacaggcgtgagccaccgcgcccggcacctttggacactttgatctgggcctgtcacagagtaacactcaatgttggaaaacaaaacataagtcacactcctgtcctcaggtggctctcagcatggcagtagggaattttccagttgatgaagtgttgagtttgacctgagttacagctacttcttattccagtgggggcaagaaatgcaattgagtttaattggccaagtcagattatagtatggtattaacagcgaatgttttcaaaagttacattgcctagtagatactctacgaggacaggaagcaaagaccaaggtctagagccagcttttgcactgactttaagaactccagcacatcaaaccagctctcagtgctgtctggacagtaggtctaaagatagggataaattttctggcatttttcttaacctaagagttctttttgaatgaaaaggactgtgtgctgacgtagaagaaagtgtaaaatcaagaaaacactgccttttattcaacataaacttacatggcataaaatttatccctaaccaaattctacctctattcatagacattttggtggtatctgcattgtgctctggtcaaggccctcaacataaagccctgccagaagaaagggtgaattccctttatcctgagcagaggaaatggatatgttttcccccttcatcattcaatcatcctcatcttgtcacagaccctcctgcactttgtgggagttcaccacatgaccttgcaatgccggtggaattgcccagcgagggtgctgggctgtggaggatgcccacaggggcacagagggctgggagcctccatgtgcaagcatgtgagatcgtggctgaggctctgagaacggtccctctgtcttcatccatagcactacgagcagtccaagatgttcaatgatgccatggacattctgaacatggtcttcaccggggtgttcaccgtcgagatggttttgaaagtcatcgcatttaagcctaaggtgagttgcagaacccacttttcaaaggttgttgctgagtcaccctagagaagtacccgcttcctgttagtcttgtgttactgaattatgctaaagtgttctggccgctaactgggttaccacctgagaacattaaaatctgattagagcatgtgtgtatatatgggaaaatgaatctgcaagaacaaaacctcatgaaaacaattctgagaaacagaagcagggagattagaattgggaatttgtaaactgcagattattttgaaagccagttttctgtttctagaatagtacatatcatgctgtgtcagggaaacctgcctcattacttgagcactagagaaaatgtttgaacataacccatcagaaagaatttgaccctgattatactttcagatatctagtctaaagactttgttttgtttgttcttggtctgcagcatcctttttaccctttaagggaagtgctgataccagctgcagacctctcacagccataccatcttttgtttgcttaatttagaaaaatttcacttgactttaacacaaaatgagacatgaaatgtgttcaactgtgctcgacgactcagcgtgttgtacccctttgggagggagtgaattcagttccccacttgtcagtggctgccagatgaggggcagtgtagttcagtgtcaaattgcatagttgtggaactggactggattcaaatctctactctggcacttacagctgaaacaagttcctttcttccctgcgcctcgacttcctcacccataaaatgaggacgctaatagtgctgtttcatggggttgtcatgaggagtaaagagttcccatatacgcactgcttaacagagtgcctggcatgtagcgccacgctgcggactgtcggccactgctgttcctacccgcaccaccaccctcatcatcatcaagcaaggatgttccctcattctaaaagcctagacagaagagccacaccaagctgaaatgtgggatatttggccctcattttctttcccagtacagccaaaaactctcagagttagagatgacagagttcagtgacccagttagttatctctgtgtaaggtatctgacgacactgatttaattaagttaggcatggattatgaaatggatggtttcacatactccatagttacatgaaattctaattccaaactgttcctttctttaatttgaattaatctctatgcaatctttatcagatctttgtggaccaaaaagaaaggacatttgtaagtgattaattggggtgattgcagtggggtcaaatttggcacctaatgcatggccagatgttattatctactgtgacttgtccatatctacatacataaacatttcctccttttccaaattcatcttaatttcctttgagattttggtttgcttccctctcacctttacttctttgaacaatatttgtctggactgatggaaaaggttgcaaagtaagaacatcgaaggtacttgagaaatgcaacatggaacctctctgtggaacatttcccagatacctgggccatgtcttcccttgccagatgattaagctctgaagtttttgaaagcttgctctaggctgaagagaaagcacactcacccatggtgtgtatgtgtgtgtgtcagtgtgtgtgtgtgcacatgcgtgtgtgttcatgtgtgtgcttgctcccttcagccggccagtgcattgacagcccagtagtgcactgcccagtaggctgacagttgcccagaagatctccaaacctgggaggagagttcagtagcgcgtgaacagataggcgataccaaagggaagtgagtagctaagctataatcagtactgatagatcggagtttttaaatggttgatttctgctggaaattgtactgcttgtagtttcactcagcaagatatcttcatagcattagacaacctcacgttacaattgggagaacttttaagacagtagcagcagcatctccacacttgaagagcactgtcactgcgttccccccggccaggggaggttgagtttatatcgtgtgccgggatgagtgggagagtatcggttcaccaagaagcaatgccctccttaaaatttttcctgccctttttttcttgctcttctctttggtgttcacaagcccagcccgagcaagtggtctttcacaaagaagccagggaggcctcctccctcctggtcggtggggtagtcgggctgaagaacaaggttgtcaaggctgcagaaggaggaatattctgaggagatggccacatgggacctcagcctcctctcaggagagcctttgtctcatgggaggagctttgtaacagggtccctcatggcagagttctccactgagtcaggtacaccttctagcaggactcgtcagtatctctgttaggggacacaggctggcagagtttcagttgcttcataaaataagtatagaaagtgaggtaagacaaaattcttactggtaggtgagaaggcatttcaagagggaacggttaaagaaagttgagaaatctgaccttaaggacttattttatataagggagcttgatggagaaactgggcctcctaagagagtatatttagagggaaatggcccaaggtcatgggagatgagatgacccagcctctgccaacccagagggaggtgggaagtagacagagggagaaaactccgagctggaagcctccatgatggaagaggccatctcacctcaggggaggaggcattttggagcactggtcaggcaagagtggaaggtagttaggagccgaagcgcaaaagcatccgggaaaagcaagcaggtgatttagccgattgtgggttcccgaagggaaagttcaccagctgggtgttgacctggtgcagcctaggtcctgctttcaacttggggtcaactagacctctgtagggttttcaaaagcaggccctagtttaggtgacacaagccccattctccaagcctttccctccagctgctagaattctccaacaagttctcttgctccaaggaggaagattgattaagaagggcctttttcaaagtgctggctgcagcaggtatagagagcacttctgtggagtaagaagagcctggtctgtctgggattctctttgtgggatgttacccatctggcgttttgtccaggctgcattctaggccatgttgtttgctgcggttactggccttctccagtgagccatacttcgttcccatcttagtcctttaaagtgttttgatcttgattctaccctgaaaatatactaatttatactcctagctacttgggctggaaaaagtaaggagaaattaggtttggggaaagaagaaagtgttttggtgctgtcctcatgctgctgtgcagagctgatgcagaatgggcactgagtcctcatctgccttcaagggctctgttcgctgctccagggtcccttgcaagagtagagcttcttcatgatcttcctagagtaccttttccacctgctggagagaaaatttgacactgtttttttttcagttcttcatgaccccatctgttctagatttacttttaatggcaaataatacttgaaaccaagtattactgtccttagaactttacattgggcttcttgttgggctccatcctgtccttttgacattgaggtttcccagagccctctcctggtccccttcttgcctggtaagatgcatacatgccagagcgtcagtggccgcctctgtggcatgcagacctgcactgcccttctctctcctgagcttctatgcctccctgccttcaaaatgatctccctgcctctggcctcagcccttctacctactccctttgtaagcccaaagctgaccagaccactcttgcagtgatattttggcactggccacctattgcttgagaaagcatatacaattttcttagtcgaatattcaaagtcctccatgaagcactggcccctgtatatttctgcctcatttcctgccattccctccctgctatttcttcgtccccaccccatccccaagtgttggcatgctagacctttccctgcccatgcgcctctgtctagataccctgcttcctctttgttatccttgaaggcctgtgggaaatgttatcttctctgagacagcatcctcaccccagccagagccagccctgtcctctgctcatgcatccgttgggggcctactatgcaccatcgttaccaacactactccatgtctgcctctctgtttgttggtgagcagctgcttgaggtctcaggctgagtcttctgcttctggctctgtggtacctcacatgatgcctggtggtagcttcctggtggtagctcagtaagattggtggaatgaagaaaggaataaagggatgatcctggaagtgcagcctctgggcatgagacgatacctgcttttctgtcgcagggtatctgggtagagcagagtggagcacatcttcccttaattccccgcttacctttggaaaggcttttgctagttagaaagctgtcaggcatagtttctaccaaaagttggcactttgggttatcacttgggtcaaatgctacccaaataatccctgccagcatgggtaagagatctggctgccatgatcaatgacaaaaggcacattatttatataggcttctaccgatctgcagatgggagtgaatccaggcagcaaaaggaatctgaacttgggtcacttttcttgtttcccatttgcaaccgttccacaaacattgcccccttaccatgtgcaacgcctgtgccatatcctggcaagagggccaggaataagagatgtgccttccaggagcccactgtccagcaggagacaaacattgatggatggtgacaatagggttcttagacatagtggtgcttcctgaccctgaggcccacattagtctggtttatgattttaaatttccagagtcagaaatgtttctgcgcaatacatattgcatgtggctgacttgtttggtcttttcagacaggtagagctggacacaaaaataatatagatttgactgctggttccacttgagaggttctggcctcagaattcagttgtaggagaacacatcatcataggccaagaggagagagcagggagaggggccctctgttaggagccgtgtcatttcttgtatcttatcttctggttacaaaggcaatatggtgcctttggtgggagaagggtgggggaactgagtcatgccacttgacggtgattttattaaacaagaggctactaaatagggaaacagtatgtgggaagaatgggagggctgacattttctccctcccctggactcctgtcagagccacctggtcagagcctgtgatttcagccacctgccttctgcttcctagattaagggtgtcaaccttcagtccatcaatcattccaatttgggcacagttttatgagtgtgaggggtttctggagagagagtcaatgaaattgccaaaaaattccaagaccccaaggaaatattaagcccctattgtgttgatttaaacggattttatccatcacagtgcaccagcattgagaatatcttataggctgatggaaatggcctgaaggggagaacactgataattctggagagagggagagaggagctgttcaggaataaaatctcaaagtcagaggctggcctccagcacccatgtggtgggtttggcctttgggaaatgacataaataatggagagaagcggcgcacacggtacaaatgcaggcggggctggggcacgcaccacagcaggtgcgaagggcgaacgctgggtctcctccgccttgtcagtactctggaggtctagttgctacttgtgaccaagtttttgatcaaggtgtaaattccttcctagaggggaggggaaggatcactgtgctttctttagcttttgagttactcttaactccatgaagaaaagggcaggctctgcccctccaagtgtggtctgtggcactgccaccagtcagagaactgcttgttatccattcgcaacaagagctgtcagctctaacactaagcacattgattcagctggctttcttgttaggagacttcttggacgaaggaaactgctgtgttcccttacaacctgaggctagctcttgatctcacctctgactgctagtctagacctcaaaggcagcccatctctgctcagttttgccagccaagaatcatgaattcatgcaaaggaaagctagaaagcataagctgtgctgtttttaaaatagcccttcccattagacttttatacatagatcatcagatttggggctcacaaattccttttgtctgctgatagatgggccagggagggtagcagtcagtgagggtaaaatgggagagaggcactgtgatcatagggcggggagagaggtggagagttggttagaaaccacggcggttgggtgggggaatcttacattattaagattaaatttaagaagcaaacccgaagtcagtgtcgtagctcccccataaatgcacctagactgatggatggtgactagaataaacatccctactccagctgttaggacagtcagtacgtccacatcttctatactgtcgcaaaaggctgtggttctgcagtggcttcttctgggtctgtgtttgatcacaagtttctgggacctgacacctcaaagtactttttgttctggttttcttaatgcagcactaaatgtaccccgttgtaaacaggctgggccccattttatataatatgtacctgaattttcatttccaaaaagcgtccagactctttggaaaaacacagttggtttatagacagagctgttgatcttgacagtcagtccgttgcctctttggctgtctgtgcagtatctccccaccaccctctccaaccgggagcttcccaggggtgtcgagagaccacaggcactcatttagcacctgctgtgctgatgctggaagaagatgtaaaatgtccggcacatacatatagattttaagttacaattgtggggatgttgtaccctcaaaattgttgcaagatagcaggacctgaacaaacaaccagacaaagctggatgacaggcagggtgcaagttggtggacaaaggggacattgcacatgtcaagcactgactgggttcaaggctctggctagataatggggttagggaagttgggggactgaatatgcagcacagtcatcatccttcagggcttttgattggtagagctgcagacaaagaccccacattcagccatcagtacgtaagagattcagcgtcagcctgagggagtgcagacagccgggactgcgaaggttccatcagggaacatttatctgaccttgaagaagggtgaagttgaacagatggagttggggttaggcaattaggattgcagagacatcaggaggtggggaggaacctggtgctattttcgaaggatgggaaggactcctctcagcctagagggtgaaaagtgggagggaaagaaagcaaaagctgagatggaagaaggagcctattggcttctttgaaggacagagggagccctggaacatcctcttcattccatactcttttctactatagagcctgccttgacttccccacactaagcaccacccccatgacaaggagccagtgtctctgccacgacgctgtgcctcacggtgcctgtgtccccgtaagccattatctacccgtctgtgtcgtctacactgagagttctttgaagacagggacttgtctcagtcatcctgccacaaggcatggcctttgtaatacaggctggacttgcgaggactggagagcattgctggcccatttgaaggagcacagaaatggaaatgtgtgcaatacctggtgacagtgctctttaagtggggtgaatggagattctaaggaaggagtccatcagatcgtgagggtttgggatcatccctctgggtaccaggacaaggttgccaaaatgccttcctctgccctgtagatatcctgcttggtttggtgccactcaggaccgtgagtgtgtgtgtgtgtgtgtgtatgcacacgtgcgtgtgtgcgtgggcgtgcaccttctctcacacataaaggtgcacaaccaccctgctgtgcccctttccaccagtggacagtattgttacttcccctttggctttcccaccctacctgggtgccatgggtgcggcagggactcggattcgcccctatacggtccgtgtggtgggtcattcatacatgctcataaacatctgccctcgcctgctctgtccaggggtattttagtgacgcctggaacacgtttgactccctcatcgtaatcggcagcattatagacgtggccctcagcgaagcagacgtgagtatgcacctggcgtggccgccacctgtgtcctctctcctctgtctgtgcatactccgctccctgccctgcagtggcatcacctggacaagtcacagatcccagtcacttgatctgaaactaggatttcctaatgagagctgtaggcaagacgtgtttcagggtagagccttatcccagggccttttgtagacacaaatcaccttttggaggacaggcctttttgcagcatttaccctggtcactagtaggcaaggtaagataggatgtctctaattgttttcatttgctgtgtcagaagtgatacccacagtggcgtatctataacatgtttattttagggggatgtttcaagtcgccgtgtggcgcgatgctagaatgttccccttttgtaacactgtccttttcttcttttttcctgtggtgcttcctctcctctgtggcttctgaatgcttgccctaacagcactatttcactgatgcatggaacacttttgatgccttaattgttgttggtagcgtcgttgatattgctataactgaagtgaatgtaagtagcaaactttgtgtcctatatcatggttgttttcattaagtctgacatagaagagactagaggccctgcccttaaatctccacacactttagaaatccagacacaaatttattttgaaagactaaggataatttgtagtttcctctatctcaccccatctctatctccttcccctgaaaaagagtggggaagtctatgtagaattgccttttggaactagaatagtatttcaaaagatctaattaaagttataagggctgggagttaattgtgtgtccgtgtgaatgttgtcactcaccagtcgtgtgaccgtggaagtcatccgagtgctatgtgcctcagtctttccagctgtacatggagttactgatgtgcaccctcgtccccgcaatggttctgtgagggcacaggcaggagaccccacagccagctatgccctgagcctgtggtggctgctgctggtgccctcacctgtaccgtgtctgctctgagtctgactggtgacactggtgaacgtcccacacccaaagggtgatgccagccagtggaaggctgcttggggccagggaaaagagggccgagtgcaaaccagggagagggtgtcagtccgcctttgttacatccagtagattcacttgagggggaacaagtgcagtagtggcattgtagatggagtgaaccactctccctagaagcactctgagcacctctccccctgcaaaattaagaagcgtgagaaagggagcccctccttctgcctggctccccttgggtctgacccatgctagaccggaaggcctcaggcaggcagaaagggccctgtctacctgatctgttcccagttcatcagcaagtcttagtgggcgtccagtgtgtgtgccgagcctgtgcagagcctttcgagagagtgggcggagcacggggagggactgttgtgtggtattggcttttgctccacaatgtccagcccaccccctgcccctgatgctctgcctggtgacatctgcaggattgaggattataaggtccatcctggtgcccagacagcctgcatcacacaaggactgtgaaatccctgtatgccacctatctgggtccatgctgatcctggcgtgtgaatagtaagacagccaccagcctggcagtcctaagacctggcagttgcagccctagttccaaactgacttggattccagctccctcatgggccaagtggggtgaataacatctgcccccttgctgcagatatgttatagtgataaaatgatcggaatattcgggaaaatgcttgctaaaaaccccaaagttttagggagatacaagttttgtattattctaagtgtagattttccctgtaataagtaaaacagactgtcagacgtgactgtgcccatgagggtgtgatttaagcctcgtcatgccacgctatgaccaggcactcagatggtattttgctagacctaggtatacacatattccaacttctaaagcccagacatgtaaattctacttcatgtgaaatgttccatgtgtcagctataaaattgccattcagatatgtaaatgatgcttggttgtaaaataagctggtgctaatgggagaacagcaggtccctaactgggctgccctgagctctctccgaagtttatggctagacatctgccaccttaatcatctcacaacgcaaagtgcttacaatctactcggaggtatatttacatgaaaattctggaacatacccttctgtgagccagagatggcctataatggaagcgaaaatacaataaaccagcagcagggcagatctccctggactgctcagcacttcaagtgctgtgcaggtggtgggtgtaaacacttagcttccgggcaccaggatgtggccaaggtctgtccacctggggacacccagctttctcacgcctgacctgcctgctggctggcaggggtgtagcacccatgtactcagggacagcacgcgcccggcttcctggctgcctcacgtgtgctgcaggctggccctgctcctcccgctgcccctgtcccctgtggcccagctttgctcatcagtgtatcagtgttgctgtgttcaccttgcaccagtcaggaaaggggcaggtctacgctgaagtttctagttagcatttgacattggggtatctgtgcaacacaggctttcagggggccccttcttggcatgcaattaaactttcaaaatcacctaggcagacactcccatagtgtgctttcagtcagtgacctttttcctggtcagctgtggcctgagaccagatatattcctcagccatggcaatgccagttccctaccccaggccagcagaacaccaccttcagaaatctcagtgtctccttgctgggccttggaacagaggggatgctcaaggccaccttcacatttattccatctttcaacacacattcactgggcatctatcacttacaggctctgggctaggctgtggggaggcacaaagataaaaaaggactgggtgtccttaacctctggtgtaaatacatgacagtgggactgttggttctgacaccccactcccctccacatgtagttcccctggggagcagtgcacatcacatccttggtggccttgtcccctgagctgaggggtcagctgtcagctgggtgtgaacacctttggttcatcattggctggttgtagctgccataagtcatcattgtttgcaatgtttaacctgccatgctctcttccccaaactctgttgatctttcttttctgttgcctaattgattttcatgttggttttatttttagaaaattgtagcggcaagtatatataagcatatatacggtgaagtccttaaagcaaagcacttctaaagaatgtgtgcttgtttttggcctctccacctttggttttcactgcgctccacaggacgtgctaaggattggttgcaatcatctaaattgttccccatcccatagattgtcatctccagcctggggccatcttggtcagtcacacttggctctgtgacttgccaacatagtcttccagaatgaatgatctggctgagaaatgattgaattcagcctgcgtttgtattctttgcaaaaacgttttgggtagtcctttgcatggtcctgcctgcgcacgcaccagcctgcttcatcctactgtccccctcccatgtccccacaccccgctcagttcctggtttggcagcactcatggacttatctccatcacatttggtcctaacctcaccaggctgctaaaatgacacactgtgactgctgggctccctcttgctccgtccctctttgatgcctgtttgttccttgaatgatgaaatgacccagcaacatactgtccctaacccatggatggctgtcactgacatttgtctcttctcattatcattagtgtctgggaggcaaaacacttgtttagaagctgtatctgccttattattacttactttgaaggagcaggtaaaaagtcattagggagctcactctcagagatccaggaatggtccctgccttttaaggtatgctgtttggaccaggtggctgacagtctcactcatcttctttttctgaccccacagtaaggttgtgtagtcccccatttcatatgtgaaccctttcccaggagccagctcagctgggcactgggttgtggacacagacccagcaaccccaaataaagaagccctcctcccagaggtgttacctgtgagctcagaaatagtcagagggaagactggcttctccgcaatgcctcgggttacctggcccagctgttctgggatgctggtttgcttcctatctgaattagaaagctgcatcctctcagctcttccaagcacagatagaaattaaaacagaaaatgaaatggactgatttcattgatttcacttgggaacctcagggtctttttgacttccacggttgcagggggctgccccagagcctatgtggtaagagcctgcttgagagccctgtgggaagaggctcgagggaacatcagcagagccccaggaatctaaggagctttctggaccctgacatgtagtccggcctcctgaggctaaggggctgtctcctgtagggttcccagctgaagaatgtgacatcttagggtgggaaggaactgccaagtttgtcttgtccaagccctgaggtgacactggaattccgcttattgaaaactgattagtagccccttgtggccatgtttggaaagctacctagtgaagagtccttccccagtctggtgtcctctaggggtgtccagcatagcgtagcccacttgcgttccagctccaccagttcccttcatgttgaaacctcctccatcccttgtaggggagatggggatggagtctaatcgctctctcttcatccgtgtactgttccctcgtcaacccagaaagaacccactgttcagccacagcagcctgagtgggcttttctagtgaccccactctgtatggccgctcgagatctaaagggcattagctggtataggccacctgttaactactcgggccagctttaccctggcccaggactggagttctcagctctggcagcatatttgaatcaccaaggagcttttaaaattcccaacatggaggtctggcgcagtggctcatgcctgtaatcccagcactttgggaggccgagataggcagatcacctgaggtcaggagttggagaccagtctggccaacatggtgaaacctcatctctactgaaaatacaaaaaattcggcaggcatggtggcgggcgcctgttatcccagctactcaggaggctgaggcagaagaattgctgatatcctgtaggcagaggttgcagtgagccaagatcatgccactgcactccagcctgggtgacagagggagactctatctcaaaaaaaaaaaaaaaacaacaaaataaaattcccaacatgcagatacgccccagatccattaagtaagaatccctggggtgggacctgggcttcagagattttgttaaagatccccaggtggttttagtgttcaggctagtatgagagctggcctccccttttcattgggctgacatttgtcatttgggaaaagccatcctcagggttctttaaatttgtaagatattttggcaacttgcactgtccccccggggctgccagtcacatcctcccctgaagcagccccccatgcccagtggtgtgtggtgggaggggaggtgtcgcaggcgcactgagggtgcatgaagcctggtgtgctgtttgctctttccttcctccctccctcgcatgttgtgctgccctctccctttacaaatgctgtctcctcttcccttttgttcttttaaacagaatattcatggtttgaagttcatagtccataggttgtcagtttcaaagatatcagttgaagagatgtacacttcgaaattcagttcggttgctgactttcacaaactctaaggaagggggccgtggatggcgtatcagacttgaagcagaatagggagaggcccgcaggagggtcttaggccagactgtggccaggagtgtcttccctgaccaacaggccccttactgtcttgcaggtctgatacataagttgtgcacatttcagaaggataactgtagagccgtctctctcgtgcacactgcctggtcccctgaacacaggcaagcagaggtgcacatgcgggcacacttagcatgcacactcacaccccacactccagccagagagggaagagtggaaccttcctgtgcacagccttagtgagaatgatgtggaaaatgatgagaactttaaaaaattagttccttcatttgttaaggtcttaagttgaaaaacattgtctgtccctttaaggagctgatatttcttttgagacgaactaatagaagagggaaataaaaatagcaatcctgggtttttgataaacctgtggcagagttcccattctgagcatcccaggagaagcaaggaccccttttaaactctgtcagaacctgttcctcttgggttcattgtcacattactgaatttcagtttttctgtgatatgctgaaaccccttattttctgtgaactttgtagaatttccctttggtctcaggaggtagcccttgatgctagagaggcttcagaactgagctctacctttccccagatccccagggaggaggccctcgagaagtgagcacatccagacgtgcacacatgtcccttaactttgcagacacactgtacagaaagcgtccttgaagcccctaaccggaagagcctcatttctctctgtcggctcctggtgacaccactgaggggaaaagagaggctggcacatgctggctctggttccgctgactgttgctgtttaatgtaaagatgcctcctggtgctggctggagtttgcttccaactcctctgtgttctctcagacactttctgaacactcaggtagtgctaggcaccatgctgggcacggagtggagtgaggcaaggcccctgccctccctggggtgggggttggggggcaggtaagcaccagtcattacagattctgcatcctggggccgagggacaggagcacagccagaccctggaggaggtggagctgctgaaccacaggggagctggtcctccactgtttcttccaaagactcatacggacctgcactccctcttatgtgaaagctgtctgagctgtggggcaggcagcgagggtttctgtagggaagcctgcctctctcctcctcgccctgactcagtctgtccagcttttcagcagccctgcctaagaggctgttgtcagacatacaccacccaggcgtttagtctcataggaacagagtgtggtccaagggggtttgtggcccgcaggcaggcaccactgcttgcccctctgctagagacattctgttcctcggggctaggaggcctgctgcagagcggttagttcctgagacccacagccctgactaagccaagagaactagcctcctcgcgagaagcgggggcacactctgcatctgttgaggtcttgcagcactgcctttactggatgcctgtcagcctgggcacagcatgtccccagatgtgaattagaaagtggtactgtgtccatgcccatgtccatggctgcctgccctcaagtccacctccaaggagagccactggtattttctcagggagggagcaggtgtggtgtctaaagatgggaaccacacatttttttaaagggggaaatgctctctggaaccattgactccttcctggttcattaatccattttcaatctttgatttcttaaagccaactgaaagtgaaaatgtccctgtcccaactgctacacctggggtaagatcagtgactagtccccaggggctgggccttttccttaagtttatttgaccatgtcgagttttccactggtttttctgtattctccatgattgtccttccagaacagtgtctgcagtggtttgcattcatcatcagtgtccagtactcttgaccagcccagcgttctcctctaacacagtagaatacgtggacatgcatgtgctgtgtggacgcagttttccgagctctgtgttgttagcatgtaactcttcctttcatatcatgctttttaagatgaaaaggccctagaatcacatcttcagttcttacctctgtcacctttgcatctgttgctgtttttctgaaagtgttgcatgttctactttccattgggtttgacctctccatgataacccttcagaactctgaagagagcaatagaatctccatcacctttttccgtcttttccgagtgatgcgattggtgaagcttctcagcaggggggaaggcatccggacattgctgtggacttttattaagtcctttcaggtaagagccatgccaaggacttctctctttgtctttgaagatcatatgtaagtcagtgattgtccccatcctagaggacccaggctccccctgtgtggccactctgtggacctaaatcaatagaaaacatggaatgctggagagacccaaatcagcatttcttgggtcaatcacatgggattacttgcctaaaggaaacagaagagaaagcaggaaggatccgtagctgagagatctgtagcatttccaagactgagagaggtgtggggcctgcagccctgcagtgcccccgggatgcctggtggtggtggtgagtgccaggtcccagcagactgcctggaagcccaacagcctctctctgacaccttttcctcataaggctacaacagtgctgtgtctgttggctagtctagatacaaatcagaaaccaccacctgggccagtgcactatcactgggttatcctgcacctggaagggtcacagagttcgggatgtttgggcatacaccatgtctcatttgtcacctctgattctccaggctggcacagctcggttctagactttcccaagtagaaccagcttttcccgtacctgccagtaccctgccccagacattctagccttctggactgattccatttggaagagaaggtgtgggaaatatagattcttagtaaaaggtggacccatgtagggaatttgtggatatctacaagcattagaaagtgaatcctgcatcttcattttttaaattatttgactatttttcattcaaaagttataaatgtttacaataacaaatgaagctgtccaaaggtatataaagagaaatttcaaacttggccctcacccacccctggggtaaccagtgttaccctcccagtaagcatttgtccctagtagatgggattttcacaggtaaaagggagaagggacagcaagcggggtggtgcaggcactcacaagggaagtcacagatcctgctggggagaatgaggttggaggaaggtaaagtgggggcctcaggcaggtgagccttgaacttgctaaggcacagaatcctcgacagttattattcatttaaagtaccaaaacttgggaacaaactgctataaaaatagataattcagaggtaatgttatctcactttttaaagaaattcttaaagattcaatttgccacagataagaaagtcatgttccagagcagcagttcataaaagcagagaaactgtgcaaacaaaaatcgtaaacatttggcaatctaggaagaaaatgcacgtaggtatgttgaggaaagcctgaaacgaactctgtgggaccctgctgagcagtccagctgcagggagggccaggctggcaggcacaggtcaacagctggcacaggtctgaaggtggctgagcacctgtgagccactgactttctgacaagctctctcggatagtagagaaagcgggtgctttaagcatgtgttcccagaattaagcctaacactctgggcaccctgtgcaggtagacgtgttggtcacatgtgatgaggtaagacagcagttgacattcagtgaaaggacgggggatctgtcagacactcgtacttgtatttggtgtttatgaagggagccacacttggcgaccccccagctcactccttttcttccctggcccagccccccaacttagcagttctttcagaaggtgtacatcttaagagaggtattttgcatcctacagccacagccagaaagtggttcttcccctctgacccagtaattccactcctaagacttcaccttaaggaaatacttcagcagaagcaaggtggttttgcataaagatattcctttgcgacattatctacaataccgccccccaaaacatacccacaaaagaaagtggaagtactctaaatgtccagtgttctggaatggtttgatcaattataatttcaccccaaaaatccagtaatgaatttaaggattatgagagttacgtgtctgtgttgaaaatgtttagggttaggctacagggttaatgaccgtggaaagcacatcctgcctgtaatattgtaacactgggcgtgcatgtggatggtgtcttcaggactaaagtagttgggcagggctgggatttaaacggttcttcctcactgtcgatattctttcacggtaacacgtggaatagaaaggaagcatgtggccactcatgggtcttctcaggctgtggcgggccgtcacggggacagccggctggtgctgagccaagtgccttttctctcccaggcgctcccgtatgtggccctcctcatagccatgctgttcttcatctatgcggtcattggcatgcaggtaagctccagccatctcgccctcaggggccctttcactgggtagccccaaatctgtggcaagatgtaccctgaccaagtgaagtagaagcattgtgatttttcagccaaatgcctctgctgaagcctaggaagatgagaaagacaaagctgcttagtagagagctccaggggaggcccaggctcagatgaatgtggagaggttagaatgcaccaggaaaaactgcatgtcatggcagaagaattatgctttatcataacaaagtgaaattcacttgaaactaactatttccagatgccaagactgaagagagaagcaagtagcccctcgtgggtcttttcagtctgtgccgagccgtcgcgggaacagaaggctggtgctgagccaagtgccttttgtgaccattgttgtgctttagtagctcacctttaaaaagaggcatgaaactgggctcttctgtgacccaagcagaggggctgcaccctgtttcccagttcctcctgggcatgggaaagggactgggcctgcctaacagaggagccctaacatcaagtgggcagtgggatgggttgtgggtggagggaggcagcctagtctaagaatggaggcagtcgaagagcccaggtggctgtagatctctgctggcaggctccttgcagattctccacgtgtgcaggtgctgtctttcaggtaaaggagggatgtaagtcagaaagaagtaaagtgattctatgatttttggggcagagaaatggtagtgcttttttcttttttcttttttttttttaaaatcctgaaagcatagaagcatttgcagatctctgggaatcttaccaggagttatgaaacaaaagtcagcatacttgagcctctgtgattcagcagcacgtggtgctatgtgccctggaaggtcttttatcacatatgttctcataaaaaaaagccatctcagaactgcaagctgcatggcacacacaaccccagattcacccagcaggcgtttgtaagcatctgcaggtttctctagaatgtcagtctgctccctaaatctcacaagtaaaactctttagtaccttcccattgccctgaagataaagcccactcttctgcccggggctcacagcccctgcctgttgcctcctgcccttgtctccagcctggtcttttatctgtctgctcatcacacgttattttcattccctcggtatctatgctgtcaccctgctcctatgcacatggtgctccctccacccgaaacactcttcgcctttcctatcacctgatgtatctttcagttctgagtttacatgtcacttccccctagaggccttccctgacccagccccccagccttcagtagatgagcctgtctcacgcttccctgtgtgtctggaccaccccagcatcatcactggggtttgatgttgcctggctacctttgtgtctcccccaggggagatccgcgaatgtgagaccgtgcccctctggagcaccacgttcccagtgtgtaacctgctgcctggcacatggttgtgcctggcagatcttttttgaatgagtgaagtgccaggtaccatgagaaaaccctagctggtaaagatcaaacctgagttagttctaaattcacatacggattttttttgcatgacgaaatctattctctttttcctgacaacttctccacctagatgtttgggaaagttgccatgagagataacaaccagatcaataggaacaataacttccagacgtttccccaggcggtgctgctgctcttcaggtgactgcaactggcttgggcggtgctcctgggcaggggggtccgctaggcgtgggtccagagggacggaggacacaggttattaaagcagtgtgcctttctcagttgattgtgatggctttttgtttttgtttgttctgtattcttaaacacagaccctagcatttcaaacacaggaattttgctggattgttaaaactgctgtggtaatcccgattgtggctggcataaggtttattcatttgggagttagtagggctacttaggccacctgaaaaattgtaggatgtacgtttatgcatggaggcatgcacttgaacacgaccaggaagacagaaacttagcaaaaacgtcaaggccttttgcacagccagtggggaacatcctaagatgtatgatttcaaattttttgggattgcttttaacgtcagttaattaactttgtaaaacaagctgccctcatagtgagaaaactttctagagatcatgaagtatttctaatgactctagtgactgacaagtcatttgcaagttaggtggtttccagctctgccttcaacaaaattgaacagagacttaagttgttaagtattttggtcattaaaaataatcaataggccaggtgcagtggctcacgcctgtaatcccagcactttgggaagctgaggtgggtggatcgcttgagcccaggagttcgagaccagcccaggcaacatggcaaaaccttgactctactaaaaatacaaaaattagccaggtgtggtggcaactgcctgtagtcctagctactggggaggctgagcccaggaggtcgaggctgcagtgagccaagatcacaccactgcactccagcctgggcaacagagcaaaaccttgtctcaaataataataataattaattactgttaattatacaaatgtttaaagtagagaagacacaaaaacaagcatccatttatatgcagacagttagcgcgcttgcatcagatgatggctgtaaatccaagggaattgcagcaggacctccagttactgtgataagttgcacgtgaaaatcagtaggaatttcacatttccattaattcaaattggattttcttcaaatgacttaggttttgctctaattatgagtttttctcccctaagatctaagcttcaaattccttctttcccccactaaagcccctttgttcttcatctgaaaaaggtgtgcaacaggtgaggcctggcaggagatcatgctggcctgtctcccagggaagctctgtgaccctgagtcagattacaaccccggggaggagtatacatgtgggagcaactttgccattgtctatttcatcagtttttacatgctctgtgcatttctggtaagtgagcaacacagctccccctctcaatttacagatgcttatgtagcagtcagcgttcacacaaatggccttgccctgtcccatcgcctgaggacaattgatgtggatgagcactctggactccacttggcagttgagggcttttgtttaaccaggcgtgtgtcactgccgccacctttgtaagcagagatttggtgctcactaatcggcttggagcaattaccaatcaccttagcttcttagggttcctttctaaaatttcaaagccagtgcatatggtggtgacctaagagtgtgaattatttggtgataatgaaattataaaactgcaatgtgtttcagaaggccttccttccccaggacttaattaaagccattccagaaagctagaatcacactcttttcttaaacattctccaaatagaaagtttttacaacttctcttggagacatgggttcccatgtttcatgtccatgtcattagaaagcctgtgctcagttctaacgcaatccagctgcagctgaagttcttcctttcctatttgctttttcagatcatcaatctgtttgtggctgtcatcatggataatttcgactatctgacccgggactggtctattttggggcctcaccatttagatgaattcaaaagaatatggtcagaatatgaccctgaggcaaagtaggttgaaaaatatttgatttggcgtgtgtgggtggattttggaatgtcagctttttttgtggagtggactgaaagttcgggccagctggtactgttcctggaccttagattgtattttacttccaggggaaggataaaacaccttgatgtggtcactctgcttcgacgcatccagcctcccctggggtttgggaagttatgtccacacagggtagcgtgcaaggtgagtgtcctgtgtgcgtgtctgacagcctgtcttgtagaagcttgcttcatttaacaaacacttgttaagtgacacagccaggccttctgtcagttgctagggatgcagcaatgaataatatgtggttcctacctctggggaaatctcagatttgtaactctttggacaccctctcaggaaccatcagaagaggaagggaattctgtaatttgtcattgggtggatggtagagaaggcgacatttcagtccggtccagaaggaacacaggagtttgtcagaggcagggagggctcagaaggaggcaggagaatggacatcgtaatggcaaagggtgagccattgggtcatcctttggctaggacataagaggaagtcagaaggccccaggtacaagctgagccttctctgtcctgctgaggtccaggagaatggggaggaaacgtgaatttcaggttcccatgttaggaagttggctgttggcaatggagaagtagacctgaggcagggggatcaaccaggagagccagaacgaaggcagcagaagtgggaagagataggagcagtcgcttggagatccacttaggatgtggagtggggaggacttggtggcctgggtgaggggagggggagtgctaggagagcacatctcccagcctcggcattgggggacatggtgctctgtgttccacacgtcccctctgctacagagctttgtggccaccacaggaaatggggcccctttgctggcacactaggctctagtctctcagggatggatgcagatctcccagtgcaacgcagttctgtgtttccatgccagagcacgctctcaggaaccctcagtgagacttttccttccacagaactcacggtgtagcaccttacatttgttgcagcgacaaaaaagattttcctttttcaaggaaaacgcaaggtttgcctcttgaaactctgccttctagaaattcatacagtctgcatagcaactagttcttgctcctcatggatccaaggagatcctggggtcaggcgtttttaccactccaggatgctgagccagctctagacagaaaccaaggtagcagaacagagtctaaaatatgtttcagactctcaaagaaatcccttgagccagactcatgttccctgccctgaaaatccagaaagccttctaggcaaggccttagggtccttgcctctcttcaggccggactctggatattgaaacagagcttgacttttttttttccataaacttcccagtactggcctcttttctgctttccaagaacagtgtgggatcccgttcactgatgtcttcttgtgtttaaatttccagacccttttacataaagctttcaaatgtccttgaggcacagtcatccattttgctgactcaggaacttaccaggaaaagtgaacaaatgtccagggttccctggctgcctgtgctggttttgaagagggtgccggggttggtaggaggactaggaatttgggtgggatggacttatgcagacacaagattccaaatcatcaatatggaagagaaagaaaatcttttcttttggaacatgctgttaatgaaaaataagaagtttttaaatattatcaacatcaccattaatttagtgcttgccatttgcctcacacaaaactctttgtgtccgtgagtcctttaatccttgcaagttcccatccattgggcatgtcatctgcatttacaggttgaagtgactggggtccagagagggtgtacctcacccaaaccccctccaactctcattgctggtgttaaagggatcaggatatagaagaggagtggggagcatggatcctgctctgaaagaccaaagcctgggagaagccacataggctcatgcaaaatgccacaagatgtacatgatggtctaactaggcaaggtctgaaggacattccctgagttgggaatagtaatggatcccgtcggttgagaacctaagtcccaggccctgtgcctggcccattgtcttttacttcctttaaccctcacaacagctttaaaaacatgcttggagccgggcacggtggctcacacctgtaatcccaacattttgggaggccaaagcaggaggatcccttgaggccagaagttcaagaccaacctgggcaacaaagcgagacctcatctctaaaaaaacataacaaaacaaaaacaatgtgcctggaatggaggtctgaccctaagatctccattgagattagtgaaaaaaaggagaagactgtttgaacagtgaagtttcacggtttaaaaaacaaaacatcatctgcgtgttaacatttatatttcatgactaaacctttgatctttgtcatcccagagtcccctaagtggtaggttgtattaatcagggttctccagagaaacagagccaataggatggatatggaggtgtatatgtatgtatgtgtgtgtgtgtgtgtgtatttgtgtgtatatatgtgtatatgtatatacacacacacagaggtttatcatggggaattggctcacgtgatcatggaggctgggaagccccatggtctgccatctgcaagctggacctggtgttggtgtccactctgagtaaagtcctgagaaccaggggagcccatggtgtaagcctcagtcaaagggcaggagacaattgatgtcccagcttaatcaggcctatagagagagaattaaatcttcccccacctttttgttctctgtgggccctcatcaacagaatgaggcccacccacattggggagggcattgctttactcactctacccactctaccaattcacatgctaatctcatctggaaaaaccctcgcagacacacccagaaatcatgtttaaccaaattggcatctcgtggcccagtcaacttgacacctaaattaaccatcatatgcgtacccccaaatggctgttgaatggaattgagggttgactagaaaagagatgagtgataaacggaaaataaacatccaaaaggatatggtcgtggtcactcatttgcattctacaaagaaaccttcctttctgtttacagagattagttgccatgaacatgcctctcaacagtgacgggacagtcatgtttaatgcaaccctgtttgctttggttcgaacggctcttaagatcaagaccgaaggtgagcattccctgccagcaagacaagatggcaggaaaggagagagacatcacatcccatcttgccttcctcatctgggccttttcttggccaaggggaggccctggggaaggggctggcaagtagaatgaagatgtccatgctgggcttgccggctggcccctgcctcctgtttcctcatcctttatctccttcctttatgcttcactttgtcccagaatgttttgagttgactcatactactgcttactacatagcaagggaaacaggcagggtatcggagcagagacgaagccatcacaaatgaactcactccaaccatccctaactagttgtatgacctgcagtgagggatttcactggtctgagctgtagtttctttccctatgaaaaggaaatacggggatgtctaggaggtcctgaggatgaaatgaggtgatgtctgcaaaagctcctttgcagtgcctagcacacagtcagcacttgagaaatatagtgggatcagcatcttcccagctgagagaccaaaccagaatggccttcacagccatgctcagccctggtcaaatcctggtaaaacaggcactagagtgtggccattggagctggctcagtggtgacttcagaggtggaatggagagcagattgcaacaggctgaggagtgaccaggaggtggggggaggtgggaggtggagacctcaaggagagctgactctctgaggcactggtggaggagagggaagaggaggcagcaagggactcatgctgagtgcaggcaggtgacttcttacaaccctagagcccagggagacttgatccagcaaagccagcctcttccagcctaactaacaggggcgccttgtagcatgcttgtctgtacctggccccaggccagcattgttaagggctccagaaggcagaatggtcctctatactgacatgttagttgaaaagacaagtgtcagctcatataataaaaggccaaggttatgttgtatggatgagtacatatagtaggaattgagagtcttatttgggtgaaatttaggctggatcttcaaggaaggaggtacgatttggaacaacccatgaaagagcagaaggcaaagacattctgggttgggaacaatggaaagcaagtagtaggtctcagctgtgggagggcaggatggaatcagagtgggacaggccttgaatcccagggtgaaccgtgtttgttcccatggtggagggacttcccactgggaaggcatgatcgctattgctgaatataggaagtgtgtttgcccctgactggggagagcctggtgggagtggagccccatcagagggcagcatgttcatccaggtcaggctgggacaaggctgtgcaagcagaggaggagctggggaacagaaatgaggcttgcttttccccttttgttttttgaatccagggaacctggagcaagctaatgaagaacttcgggctgtgataaagaaaatttggaagaaaaccagcatgaaattacttgaccaagttgtccctccagctggtggtcagtgcagtctatttcctaagtagtccttggccagtgctttggttttaatgctagtgtctccagaaagtccagagagtgtttgcaaaatgctttatgtatcatttagagcattaaggccaactgataaagaaagccctttggccatttggtgtgattattttgggggtaatatgaagaacattccagacaaaggagaggcttcagtgaaaaaccaaaactcacatggctggagcagggattttctttttggtggaggaattaatgtttgaggacaagattgtgatctcaaagtgaaaagcctatattttttgtccaaaatgaaatattcaaaactagtttccaattacccttcagtatattgttgaaaatgtcccatgaaaaatagacagctttcaggaaattgtatttttgaaatgttcttatcaagactgaatttactaccgtaattaccaaaaatgtccttttaactaacaggcatgcttatttccttttgttatttatcacaaaataactaaccttctttaaatttttatatatataaaaaacatctatatatatacacacatacagtgtgtgtgtgtgtgtgtgtgtgtgtatatatatatatatatatatatatatatatgcatactggctttgcatttttatttaagtacatgtggacttagacgttgagatggttgtttttgactgttctgtttccaagttttaaaggtgcaggatctgttcacccagtgccaccacaccagcattctagcatccttgggccgggcacgtgatgagcctttggtgtgtttcgtgaccagcgaacttttatagcgtcgctgccgccacggctttcgagactggtctggctcaggtctggtagctgacttcaggacccaggccaggacggtgaccgaggccctgcccctgagaaggtgatgagctctggctcttggggcgcagacagagcagcatgccagccagctctgctccttagcatgaagcgagaagcaacgtgagcttttgttgctgaaggggttacccgtagctggcacagccacaggctcaaagctggggaagatggcccagaaagaaatgataaaaggaagacaaaccaacaacaacaacaaaacaaaacaaaagtcctcccacctggagggccctggcttcccacaggagaaccgatactgcacatttaaaacaactccttggttttcattcttttctttttagctgcacacctaagagcttgcatggcttacatgaaatgctttggaaaaattgtaacaatgtgcttgagcttttcctgcagcctccattcctttcacctctcagtctttcagaatattctgaagcaattctgttttagggtggtggcatggaatcagagttatctcttgccaactgtattcccctacgttgtttctttaaatacagatgcatgcttcagaatagtgggctatgtctgtctatgtaaaccttccccctgcgagctgaggaccccgctcctccctcgctccacctcacatctctcttggaacgccaccttcatcacaaccagccagactcccacattgatgcccatcctcgtgaaatgccctcggagggtgtcatttgcattagtgtgaaacttcatttcttttcattttaccaaaagaaaagtccagaatttagctcgccatcgaagctcccttcctttgaaaagctgatcaacttttagctttatcagacttctagtagagtagaaatcttcttctttcttggtccaataactggacctcgccttttctctctatttcttaaaatggattggagtttaggatgacaggttttaatctattccacaacggcagcgagaggcagtgtgaggcacaagaagagagaagtggggccttaggagggatgcaaggctttgcaagctccctgcctgtgttgagtgatgtgcccagtgcagggcttatccgggctgaatctcatgtgagtgctgtggccacgaaggaagttccgaaggcagtggccatcaggctttggtgcatagactctggaagagttgccggacagggcttggttctccacattcatcatttgtctgtctttcctcttttatccttcagtaggcccatgtccccaacctttcctgcatcacagcatacttagaaaaggatatttgcatacccctctgggaacagatgtggagttcttgaggctgagggcctcagcatcccctacaccatcacctggtcaagaagcaggagactgagtaaggccagcctccactccaagtggctgggactggcagatgtggggtgctcaggaagccccttttagccctggtgatagaactgagtcagatgcttgtcttgggtggcttcgctagtgtgctgtgaggtgtggcctggctcctcatgagcctgatgatgagatcaggaatgagctgtggatctgtggatacatgtcaggcttgcttcactcccagtggcccgggggtctccgctgccccctcaccatcagtgctgagccgcctcatctctgcctctcagctcaggttctcacctctgctcttcagccttcccgtgccatcttgtgggtcctttcccttcatttcagaagctctctctcctccccaggactctcctccatccatgacctggatcctttgctcctttgccctgaagagcacactgagctgcctccattgccttcttttcagtccggagcccagatggcctccttgtattcattccttctcttccttcctgttctgtcctgctgtagctttgacttttcttgttcttaggaactcttccttgggcccagtctcctaattagcacagtgtctcaatggagaagacgaagtgacccttgagttctctcctgcagagctctgggtgggtctgcctctactctggaggctgaagggagatcagagttaggcctgtatttgctagaagcatcagggtggaatggggtgtgggtcttcttcaggtagagccagggcgttttctgggccccacagagaagacacagagccctggaatatagaggaaggctgtggcatggcaggccaccagagactctccctggggtccctggagtcattagccagacaacagcgtgtccactttttgtgtgcagcctgggaaagggatacacttgcatggtgtgagaggcagctctgaagaagcccagcagccagtgtggctggagacggccatctctggagaggtggtatgaaggataggatcccagactcaaggagcacactgtcctgtggtaaggtcccggcttgactgagctgggcaagtcatttagccctctccatctgttggagggggtggtggtgagcagatccaccatgtcagagttgtgaagaggccatgagacccacatggaattcttctgacacagggcttggcatctatagatgtccaacagtaggggctggctagagccagagctgatattccaaacataccctgagcaaatggggaggctggagagtacagcgaggggtgaaataccaggacctgagtggtctctgctcacctcctgccttcttgcctatggaccttgcatcattagacaagccgagacagattaggaaccatgttttacatgctactcagagtctttggcttatacctgggtggcccctacaccactccaggactatcttagcttaggtttagaaggaacagaacacttctccaggccagaccacctgagacagccttctcacacagtaacactgagtggcttctgacagggaggcctggagaggcagcccaaggaggcccgggcatctccagtggggaccacaagatgttggcagcacctcctggatgggcactaagtgaagcccaccccgggtacattagtgaaggatgatggttctccatgtcccccagcccatcaagcttcaggatccatgtcaatggatgccaccgtcagcacattttaaaataagggtgactctgagggctcatgatcaacatcaagtgcccagcacttaagacagcctgagccaggtggctgagtgctttacctgcttcctcccacatcatcctcacggctcctctgagaggcttatccccactttacagatgagaatacaagctcagagaggttgagccccttgcccccacatcagcatgtagatcttgcaagggtggcctggcctaaaagccagctgctctgtagcctttggaccagcaaccattcctccttccagcctctgcaagttgtggtcagtggcccccagggccccacatggccccacacacatgggacggagtactaaagtggtcacaagctttacccccaagagacacagcacactgaagatttggtagcaagcagccgtgggagagccatggggcacatttacacgtccaaagtggtttaccatgagacagccagagcctctattctgcctcatgcatcacctttaaagtcatcagcagagttctgattccccaaccatacacgttggaggttgtttctgaacaaagcaaaaataagcccagctcaactatgaggttggttggagctgtcactacagtgcagaaaatgagctgttcagaattacaaaccaagaaatggtatatggagcttattggtggagaatagggggcggggagctcatgaaaatctgaatttgcagtcacttttctaaaccttcctctccttctgagcatgtatgtcacctttctaggtctctatcttgagacatcgggatttggacggttaattgcccttgataagtttatggtagttatacatgcaaatccctatgcacaggggtgaaatgtggcccgtgaagcctctttttgttttgtaatttttattttaagtaaataaccaagacagcatttcatagtgttactaatatgctgctctattaaactcataacaaatatattattttctgcaacctagagtatcagttcatttaactgacactaattttgagccttagttgctttgcaaaaccttgctttttgctggtttgagacccctgtgttatatgctgagacctcggtgccttctgcgccggaccgcccacccgccccactctgcccctgcccctgccccagccagaagcaagtgtttaggctcttggtctaatgtgctgattcgggagagctctgtctggtctctccgtttagatgatgaggtaaccgtggggaagttctatgccactttcctgatacaggactactttaggaaattcaagaaacggaaagaacaaggactggtgggaaagtaccctgcgaagaacaccacaattgccctacaggtgaattgttgtctcattttgttttctcttttgactaacgattttacaagcttatttgaaatactagagagctgcctattcatggttgagcagtaccacaaggattttgtttaaactgagatactacacactcccccaaatgtggactagccatttctgggccacaaggtaagtgcttccctccccgatgcctaccccatagagccctgcacctgccactacccacgcggcagggctgccaggacggagaggagcgagcgctaccctcgcaccccagcccctccaggcagcatcctccaagcaggcacccaccttccccacagccctgggctccagggttctggctgcccagtgaatgaacagctttccatctgaacgcaagtgctttgttttgtttccgtttgtttcttaccccactgcttgttggtttttggtccatttcagtaacatccatcacctcctagtatgtattctgtgtgtgtgtgtgtgtgtgtgtgtgtgtatgtatgtatgtgtggtgtgtctgtctctgtatgttgtctcctgatggccaggaggccagctgtgcacatgctatgctctcatgccccagccagcctctggtccctctccctcctccacctgggccctgctgcaggctcctagagtgtggatgtggctttcaggaacctctggtaccagccagggtccttgcatgcgaggaatgtagaaacctaggaaagcccaaagctctgggatgggaagcaggtatgtggaggggcaaggaaggcaccatgaggaccagcaggaagaggggctaggaaggtggtctgtgagtgccgtggatgaaggaggcagggcaaagagggagaagatgctaaggacagggaagagggaaccacagaggctggcaaatcatctgaaacaactgacctctgctgcccagagtgctcataatccatcatggataggataaagaattttttaaaatctatttacgccacaattttatgcccctgttctcagtacatgttaaatttggccttgtagatattgataaggttcaacatggaagagtccttcactcttatccagggaaaaatgcgcagcgttgtgtgttcaaagtgatggtaacagcccaaatgagggcttatctttgatcttgctgagagagagaatatgaatatgaatatgaatatgaatgacagtgaatgagtgaatgacaaacatgagctgtgtgtgtgtatctcgtgggttagtagatggccttgtgtaacagtgacctgctgattcatggtgcaacctctgctctacccagacagctacaggggctggggaaagaggcatatgcgggttggcaggtggaccatgaatccgactgaagacagtgatcttcctgcctctcatcacgtatcctaaaggtagctgagggaatcacaggctcagtcacacagcccattggcatctcaggtggtaggatttgcaaatgaagctttctcacttccaaccaatccagtttgtaaaagtgacagcccccctcctggattgcagttcacagctagcctccgaaagacaaagcaaactgcagagatatgtttgcagattagaagaagtctctggtccatccatccttgagggcagcgtggccaggttgggtgccaggagagggagtgatgaacatgcttctgcaggcttgtccttaaaggagtcccctgcccagaagatgaggctggttagatggtttagttccatttcccagtgccctctgcttgtagggaactgcttattgttctgggagcctaattgggaccagaacttgataacttttctggagggaggaacatagtctgtcatcgatggttgatgtcctaatttacagccagcaggttagctaggtaccatgagaatcttgcattttctgtgagaggcatggcggccacttggatgcagggtcatttatactttttctgaacccccaagacttcccaattagacaatttcagcactttctctagtggctggaaatagtgttttgatgttttaagatatgcacaaacaacacacagctaagtcattaccaggtttcacgtatggggtttactgagtcttaagttgaagggtcaaatggcatgaatgatacagcggcaggttgtgggttaaaagactctttttgtgttgcaataatgttgagggtttctcctaaacgtttttcattttattgtttatagagtttcattttattgatgaaatgcaaacatttccagttagatgataccaacatattttcgcatggctccattgggagctgaagcatcgtctgtaatttatgttgagaatgcagcctggaaaattaagttgtgttcataatcttaatagagaaactgaaaatgtacttgattctgaaacattaaacatagacattttttttgtctccttgaaggataattctaattgcattttggcttcctgtgctgtagaaatggctgtgagtgtgatttgttactccatgtttaattagcatgagtaggctttcgtttctgcgtgatgaaataccgggtgacgatgtagcagttaggaaaatttggtgggacggcagtgggagagatataccaccagtgtaactaggacaaggacacagcctcgggaagcccctgagagtgggcgtggcctgttgagatggaggatggcttgcctcctcccacagcagggtgccccatggctggcagactgcgtgctaatggaaagtggagcatggccgtcgcagtgtgagcgcagaagtgcggacctaggcatgtgcgtgcttgtgctgcgtagggtgcagtctgtctgaacagcttccaggatgggcccaagacctctgcgcccccacccccagggaatgttttttcaaggacacatatacgcactgtggttttgaaccctgtgggctccatctgatctccctgtgttcagaccaactgcaatgctgcctcccacatgaaggggaatggcttgagctcctggatccatgtgtgggaaggagctcggcatccggtgtcttctggcctctgtggtctgaatgagtgtgcagtttccatccttccatccatcttcatcattaaaaccaaccttctctccagcccctctacagagggaaccagagagaagctgcatcaggccttttttaatttcctcttgcgcatctcctacatgccatgttcactttgggttgactcagcatttgctcgtcatccattgttgctacatccgagtgacccacgagtttccacgaggggcaaataaataaaggaacacagccatgcagccatgaaaattctcagtcctcctcccagcagacagcaatgcatgctgaatgtcccatcagaccttctagatgaggacatctgtgcaagttacagacactcattagtccagtgtcttgtggataagaaaaagaccccaaagtgggaaaagttttgttcatttctctttcttttaacattcaagaatttcctttctgcaaaagacatgcactccggtggaatccgaggacactatgtcccccactcatcccagatgggagcctttccatctccattgtaggaaagctttggagggatagtccttttgcctgtttggaagtttggtttaaggaggagaccattatttctagctataaagaattaggttgttaggttgaataattgtaaagcctgtgcccgagccgccagttggcgatgcaggtggttgaggggagatgtgggtggtatataagaagcaaaggactctcagcccctgatgtgccccgcgtggtcttcttagggaggctcaatgcataaagacagaagaaaatgggatcctccacagagatttaatctgtagaagatcaaacacctgttgcctggtcaccttagtctaaaaagtagtggagttttgttttgttatttttttaaagcatgattctacctgaagccatcaaaagcctctttttaaatttttttctttttttaatctaagaggagaacagatgctaacagatgagatttcactggctgattcgtttgtttcagatgcttgaacggatgctttagaattttctgcctgagctacggcaccaagctggttagtcggaaggcgtttgtggctaaggccttgaaagggaaaagtctcaagtgggcttatttctactgaaacagcatttcagaagaaatgcaggaaaaagcagacccaaggccccagggagaccccttccaagcaaagcactcctccggaaggtggaagcggggccgtggctcatctgcggagccagggctgcctgtcgcggacgttgctcacggtggttctttttcgtgaaagggaacgtacaaagcttaacagttttcccttccaagcagagactcagagaaagggaaagagtgagagagagcaaaggaggggggcagctgccccacagagaaatgaaatgaacacaacttcctgatgctggccagtaaaacaaaaaattaaaaataaaaataaaaagattaagcagacctgcctaaggtgggtatctgactccattccaaagtcctgcatccctagtttgcccgaactcccaaagactgacaggcccctcggcgctgagctgacagagttccttttgtatgccagtccgccatgacctcctgagcgtccggccctgctctctgcagagacccagtccagaatacagtgagaagtggacaggccaggaagctcagatacacccattgaaactaacacatacacccgcatgccaaaaccaatccaggcaacacctcaggttccatcttaacgtgtccacaggaaacaccaccacacccaaacctcatctaacattgtccgtctttaattcgtgctcagagccagtctggggatgcctctttggaagcagtgtggtctagtttcaaggacactgggagtcagggaacctgggttctagtcccagtttcagcattcacttgctgcgtgaccttgggcaagacacttaacctctctgtgcctcagtttcccccatctgtaaaatggggttaataatgtcgacctacctcacagggctgttgtgaggaatagctaagtgattgtaaagcactttgaacgtataattgcttattaagactacaacaataataatatcatatgcctgtttactaccagaactttaagaaattcttgttttcctttgatctcttttctgttctgtaccatacttacccattgagaaggaaaattccccccttttaaagaaatctaggcaatgcacaaagatgtcaacagaggtaaccctgcaggttgcattttcacatcttaagaatagcagatttttgcccaagatgttggtcgataagggtgtctgatcttgaattctcagctgattccaagtggtggttggagtctgtacatctgatgctgagcccaagacacccaaagtggccagtttgggttttaagatcaacattcaaagtagccatagtgcagaggtaatgcagaagaatctaaaaaaattgaagtatctgaagtgtatagagaaaagaagggcttatgagcccctttcacctgccctgatgtgtacaggctggaagctgtgtgtgtgtgcgagtgcgtgtgtatgtatgtggggtgtgcggagacaggggaagagagagccagcaaactctggggggccctattcctgtagaagtggacacccttccaagcatcctgggagggcaggagtcccaaaggctaggcagagggtgggagcaatgtcaccagtgggaagtatgctttctgcaggcttgtcctaggtgtgactgacagggtcagtcccagcctcagggtcttttccagtggtgtcttttgtgcctatgacatttgcccttggctgcagtcctcactgtaccgagaggtctaacctacctggacttcagtggacctgctgtcctcattatggaaatgggcctagctcccgactctgcccccatgtgtataagtgtgcagactagttaacatccaggagctcacagtaggtgttgtgggttctcacagcacagtccacagggcccaagggcaggtttgactgcttcgtgctgcaccacatggtgatgtgggggatggggtagaaagccaggaacactccagtgtggccaggccacttgtcaagatgttgaagcacagctgcacctggtatcaaccgctgttaccctagcacctgagtctccttccccactgccagcagcccagcccctcctgagactgctctgtgacccagcagctacaggtctagtgcctggcattgcagggagcctccaggaccctgctgtgatccaaaggcccacttctgctctgattgggcagcacctgggtatattaagttataagaatttatgaagaatgtgatgtatcgtccctgaaagggaagcccgtcagtcctgtgggggtccgtcagtccctctgtctgtctttgacccacccgacgttgagttgattcagtgctgaaggatggcacgtgcctaccccctgtatgtgtcactctgtctcagagggccggtgtgaccgaccttctagatccaagattccatacactcaggcctcggcagaaaggccccaagcgattcaagtgggcggcgtttccatgtgccttctccacgctcctcaaataagtaaaaactgacaagtgaccactttctagatgggacttagggagtgatttaaatggaacaagagagtcttctccacttgggcctggctgtgttgctggggaatggcattggctaaggttggtagccaaggccagcttaggaaagacagccaggaatcaggaaagctgcttccagcttcaactcaaaagggaaagaaggcttcctgaaacttgatttgcagtcaaactgcagagacaccgctgtcgtttctcttaaagccttggcagagaagtgtagcttctagtgtagtcaaagttgtgagagacgactcaagttcattatttagaatcttcacagacacacacagcaaacttggcacccccaacaccagcatccataggctaaactcttcagctcctggatagaagatgagaggcaggccagtatacattgtagggaggctcttctcaaatagcttatactgtttaacaacccaattaaaaattaatccacaggactattgggtactacattctatactctttctgaaagtggggagatctcattcctttgagaataataattatgttcaggagtctttgagaagaaagactgcaaagaagttaagtgatgtgacgtagtagtaaaaggtggtaattatcgtggcttgttatttagtaccattcacctagtgtcctttggcagcccaattgtgtcatgattagatgatctgtgcgaaggagctggctaagacttactaacagttctagggtgggtagaaacccaggtgagttcattctccttggcacctcttagacctaagggacacagctgtttgagatcttggaagggcacataattctaaggcatggtgaaggcaacccattcagacgtcccaaaggctggctcagggaagccataggaaggccatttcttccaagagtggagaaaggtccacagaagagtgggaatcctagatggggtaaaaaagtctacacctgaggaaaaagtagtagtgcctgttggaggatagattgatcagcagttatcaaactttttggtcttcggacccttttatactctacattattgaagacccttgtgtgtcaatatttactgtcttagaaattaaaacggagcagtttttaaaacaagaacatgcaagcacaaagacgccagggtgatgacatcatgcatcaggcagcctttgaaaacctcactgtgctctcatgagaggatgagagtgttgaaggcaaagaacatccttatgttatgcaaatcacagtgacctcatggacccctgacagtgtcttgggatgccccaaggtccccagaacacacctgagaactgctttgggggaatgctactaggtccccctaaaggcagagggtgctggagccttttaatcatctcccttgttaaagaggctcctgtgcagtggcactgccctaactggagcccttctccccctccagccccttcccagtctcagcccactccccggaggcatggagctgcctgtgtccccattcgtctagcatggccgagtcttgcggcctgtgctgatctgcaggtgtgatggtctgaatcagggcaggatagaaagtgtttttaaaaatcagctcccctaagtgcacaactgggaccaaggatgtgtgccaaacaggatccgtttcagggataacttttgatcatttgtcatctccatgctgacttaggaatataagagctctgctagggtagtcaaaagagggttagccttgatcaggtggcaccccacagtcgtgactataggtgagtaagtgtgtgattcagactccaatccagcgttctttcccagtaggtgcagtgactttgcctgggtggtggttgaggtggggagtttgggagaggtaaggcagcccagtgtcacaggaagaacaggcttaggggccaagagtcctcactgagcctttgactcatttgggcacataatttaaccacatgggaataactttggctctcccttcctcccagaatctagtggaatatttgtatgtaagctcacaatgactggtataaagatgctatcagaacagaagttgtgttttacagcttctgctaagcctaaactttacagaatgctctattatcaggaaactggcaagactttttttgattcggttgttaaaattacaacgaatcagattcctgattgcaccaagaatcaaggtggaactgaaacggagagctctcagattgtgtgcaggcaaaggtcatattttagataatttctttaaagtttcctttatctttccaagtgatgggaatagcgcaacccctaggggagcttgtgggggtcatgttacccctgacttttcagtgagggttggaatcactgtggatgactaacagagcgccaggatcccaaccctttatatctgacacaaggaccattcacaatggacacaaaggctgccatcacattatccctggaggagagtggtgacaaaataaggggtgtgcccacgtgtgatgtgctgaggaggcggacggcagcttgcagatgagcaggtttattccataagaacttaatctcattctgttttctaatggaactagtctaaaaaggtcccctctcattgggtatagactgaatcctgctaaagggttaaccagaacttgtcaccagcgagacgactgtgtgcagggccagcctaggctgagtgcagcctgcctgtgatggggaacaggctctgccaggcagggttctttggctggagtctcaaagcctggcgcttgtatcctgaagatgaatggcctggcccagtcccgactagagacatgcatctcttatctccactgctacagcgtaggtccagggcggggctctgggcacttgtgcatgcttgctgtggcgctgtgagggctggcagatggctggtgtgtctgatggagctagcttagggacacaggcagcaaaagcattgcaaatgcatctaggcaggagaaacttaaccctaaaagtgggcaggagaaagaaaggtaaatgggtgttcatatttgatgtcaaaatgtcatcatattatgctattcagaagtgttttgagacattttagttttttttggtaacttaatcattcaatagaatatctatgaaattccaactaaatggtgtctaaaattttaagcagcagtctacaggcaaagcgccaacatttcttttctaaaaattatttatgataacatctagcattttaaaatcaaccagaaactaggcttgattctgtttaatattttataagattggacatcttaaaataagtcaataatgtttatattttatagcaactctgtgtttcttcaaaaccatatttctgctgtgatgttaatggaatgactttatatggctttaattgtgttggtttaagtgctaatgaccacttttcaaattaaaatagtattttgctgatagaggtagacacagatatgagatatgaaagaatagataattttactgtttgtaaagtgtttatcccaagaaaaaaaatgttcttttttttagggctgtggaaaagtaattttttcaagagtctaagatagttttctgtatttctggggattggaacttgtgcctatggaattttgggagcagcctaagctaccttttagcttgatatgtgtgctagaaaaacttcattaccatgttttgtgatatgtaataaattcagggtgctgtgcttaagcttcatgtcaattctagtttgggaacatctgtttccctcactcccagtcgtgggggacagcctgacctggccctacccagaacacatgtgaaaaagtagagtcagtccctgactcttatgaggtctgttttttcctgcctggaacaagcagaatataatcatgatttctgactctctgcttctgtgtctgggaagagcgattcttctctcctcctctaatgtctctttaataaatatgttgtcattatttgtctttggaagtggcaacttgggccacctttcaaccttctccatgatttatgttgcaaacaaattctctgtcccatgtctgttcattgcactatcttgtcgactaaatcctaatcttgtgtatcactgaagatgtgctggagacagtttttgtttctattatgcaattatgttatatgtgtatttcagtgaaatgtcaacccgtcaacagaggatgatgttaaaaattatccaaataaatagttttctatttcttttaatcagacctagtccaatcagttgaatgacagtaaataggattatatgttgtttaaacttgggagcatttctggcctttactgccttgtaatatggattaatgtaccaaatttacttgggggtgttgacttaagtgcattataacctatgtttattttgtggaagcagcagcaggtgtcttaaaccttgtctttttgtttgggagccttagatatgtaaccgagttttcttcccagttgatccaaaatcagaagtgaaccccttgcttagctcaccatcccttgatgatgtaccctaggaagctctgaatgaatgaaatgcggctgtttagtactgccgggtatgacctttcttcacgttcctgcagctgtgctgtgtaagagcttttaccaacatagcattacagttgccttcttgatgtttccatgagaatggcaggtgggtccacctcagaaccaaatgacttcccaggctcagatgtgctgaactcgtggatcctgagagagggaaagtgtgtgtatgtgtgcgtgtgtgtgtgtgtgtgtgcgtgtgtgtgcgtgtgtgtgtgcacgtgcacgcacgtgtatgcacaagcatacccacatgtgcatatgtgtacacacatgcatcctgagcctgtgatcagagggacaggagagcaagaagcagcctccctgaccaccccaagaactgtcttggtttgacccgggacatgactgtctgtcccctataagatctcagcattcctagtcaggaagcttaaagctttcattcccagctcttccttcaccttcagaattcactaaatggaaagatctgctgctctatcttcacagaatggttcaaaccaaacccaacctggcaccatttttagcagaattgtctcaaaggcttggtgcttttgtgcaccaggctatttttataagggcctcttgggaagttcctgtgtgactttacattctaaattatcatcaccagcactggcattggcaactgcaggagaccagttttgagcatccccagaccagtgggacccagccctgatggatctggccagactgcagccaccatcccctcctcctccctgaaccacttctgggcatctgttctaccccatgcttgtctcagggatggtcatcatgcctatctgtccttgccacagctgcccacatgctaagaggtgttgtggaggaaggacagggaagcggtctcctctccgaggacccaccacttagtccagttttcctttgcaaaccaccctgaggttgaagcatttgctgcacatccattgtcttagctgttctccaggcctttagggctacagagctgtggacagactgccagtgagtgaggaggggctgcctggatacaggaccgtagacccagggcagagaggacatgccttcttcagatgcaggactttctgtggaaaagaataaagttgccatacagtccctattagtctttaactcagcatactgttttccttcaaactggtggtcaaaacatcatcattctctcagagctggagcagtaccttcctccatgcaccgtgcataagcatcttggaatgcttccctaatgaagtcgtgaacaatggaagggcttatcctgggccctgtctcaacatagcagggaccacagtgaggaaggcagctgtgagggcgccaggggagatgcagagtatctgtgacgggcccagagggatctaccaggggtgtcttctggtgggtcttgcactgcctgcaaaggctgataagccactttcagtttgttgtgatcttcaaaaagcggaccccctgttggtgagttctcagcctgcacacaggctacaggccagggtatcctgatgaccacggtggccgggtcggtgtgcgtgtcagtctgctccgtcgtggtccgagtgtgctggtggttgcagtgtgttgtgtcactcactcgttccatggctttttagcagaaccagtggcctgaggactgcttggtctgcttgtgcctctggcacctacacctaggcttcctcatcctagatgcagcaagggagtccacatcagcctccctttagatcggccaggctgtgctccttgccctgctctgggcttggagagatagggctcttgtaggcgagcctactgaagactgtcactgagacaggggcataagctcttggcctggcagatcctagcactagtaaccaggcagtgttccttggaagtgggggttttgcaaaggaggttacggggttgcaggcctcaggcatcctacctaggaccttcttgaccctctggatgcctgaccataccaacaacccttagactgccttcagtgacatcagtcagtgccctggattggcttttggggaagccttcctccccaccgctgaatcaggaaggagcaaagccaggacccaggctggccccagggcccatgtgtggtctaacctgttctgccattttcattgatctaggcgggattaaggacactgcatgacattgggccagaaatccggcgtgctatatcgtgtgatttgcaagatgacgagcctgaggaaacaaaacgagaagaagaagatgatgtgttcaaagtaattattccacgcctagctacacactggccatctggaaatagcagggcaggactccagtttgggcagttaatcatccacagaagagtctggagaatgcagcccatccccagggcctagaggggctttcagaccacaccctccccctcttacagaccctccccaggcatcagcacctcttctagggccaggccagctctttccctgagcttacccagcttcccctcactgcctgcttctgaggagctcggccacagccgctggccctgtggatgagcatcctgagtccttccggcagctgcctttgctaccctcctccttcccgggccagctctttgatctgccagctggctgtcagtcccccagcccagagagcatgcccaaccttggggccaccagccagcccagctgggtataagtcaccccaacttggagcaactggaagagcacactcgagtgacagccgacagcttgctccccagctcaggaaatcggtaaccttcctcatctcggggggaccaactgccacacagtcacattcaccctgatcattgagacactcagattgttttacagggatcctacggagcttgcctagaatttgtttttcatgtagaaaaagttacctaacatagctagtctgcatcaaatacttgttaaattacctggtgttgtctcccattattttgcagagaaatggtgccctgcttggaaaccatgtcaatcatgttaatagtgataggagagattcccttcagcagaccaataccacccaccgtcccctgcatgtccaaaggccttcaattccacctgcaagtgatactgagaaaccgctgtttcctccagcaggaaattcggtgtgtcataaccatcataaccataattccataggaaagcaagttcccacctcaacaaatgccaatctcaataatgccaatatgtccaaagctgcccatggaaagcggcccagcattgggaaccttgagcatgtgtctgaaaatgggcatcattcttcccacaagcatgaccgggagcctcagagaaggtccagtgtgaaaaggtaaccttgacaatgtgtttggacttgctcatgtggtgtctgcccgtgttgcgtctagtcccaaggagcaaggcgggtctgtgctctgtgctctggggcatggaggaggttccccgtaggcatttgtgtcaggatctgtgagtgccccccaggtcactgctgcctctgacactctccacgtgatggacctaaaggataagggccacgtgccatcctacatcctgtgtggggtgccgagggaccttaaaacagcagcagccacaaaatccacctctcaattgtgctcacatactgtgcgacaggggttggtgaattgtttctctaaagggtcagtgagtcaatattttaggctttgagaaccatacagtcttgcaccttctcagctctgccgttgcagtgtgaaatatgtaagtgaatgggtgtgtggctgtgcccattaaaatttccctatggtcactgaaatttgaacttcatatatttgcatatgatgagatattttttgtcttcagattcttttttatgtttttcaatcctttataacaataaaacccgttcatagcccatgggtcatacaaggccaggtggcagcccctatgtggatggcgaatcataatttgctaacccctactctaggaggtagcctgatgtttgcattgtaaatttggttggaaattaacttttatcttctccctccttcccatgttatgcctttcctggatagaacccgctattatgaaacttacattaggtatgtgctcattacctgtttttgtgttaaatactgtgatggtatgttaccagctggcctctctgagtgctgaagaatgagaaacacttctttgagccagcctattaaaggttatcataattcatggctgtggactcagaggtcagaggttgttgcttctaagcaaaggcaccttcagatccatatctctgtcgactctgttgccatccaaggactggtgtccacacacaaggtgcaccccatgggctggctcctgcaggcctcgcgatggcactaggagcatccattgtgcatttacaggggcctcagcctgtgtggctggcagctccggctgctctctggggtcaagcttcttgtgggtgctttgcagcatgacccaaacctcctgaaggtcaggaatgggatcttgtcattttccctgtagccctcaagatatgtgtagtatattccactccacatgtattgacctgagttgaattgtgggcggaatgcccattttgttgggggccaagggaggatgggtcttcctgtgtcatgttatgaagtgaagtcgggagccatgtgggcccaagttgggtgcaagaaagtggagaagtcagaggaagtgccatccttcctttggagagaggattgacatcaccacgtccttctctgaggactgaggccaggatgagccgggtttcagggagacttaccacattcctggggcagggcagcctttggaaacatggtggacatgttctgtgacagtttcccctgtggcactgtatccagaactcactcgaccttcctgatttgatacagcaggaggtcagtggccaggaagctcctttgttccaggttctgaagtcacactgggctggagctgggggactagaaggagagggagggatcagagcagatgccctgggaacccagggtctttttccctaggtccatttttttgttctgttctccaaattgcacctattcctttggctccaaggcctctggacacaatggtttgacaccaacattgtgcagggcactgagagagaccctatcctggcccgcaggcacaccacacacacagacacacacacggtgctgttgccagaagccggaacagtccagtgctgcctgaggcaggtgcgcgctgggagaagccaggagcacccgggcagggttgccggccacaggcagaggtgcagctgcagcaggaattatctgccgcctgcccaggttctcagatcctctctcccaactgcaggtccgactcaggagatgaacagctcccaactatttgccgggaagacccagagatacatggctatttcagggacccccactgcttgggggagcaggagtatttcagtagtgaggaatgctacgaggatgacagctcgcccacctggagcaggtgagctgctctggctcctgtggagagcgggaggccgccctgccctggtgctcggcccactccggaagccagggccaccggcagctgcacttgggcttcccctaaaaagcaaaatgggagcagaaactccaggccagagggagagtggagctggagaaagagagccgcagagaggcagggtgagggctattctttcagacctgttgccttatttccactaggggcctctgaggccttttagtgaaggcttgggaaatgggagatgggcctgcttcgtggctgggttaatgcctttccaccacccgtctttggagagatcagtttttgctgaattaacacttggagctctggcggccccagggctctgtgtggacggcggcttggccagcctggagctgggccaggtcctcatgcacagcacctgcctcctgccacttcaaggggtctctcggggagatgaagaaatgaggggtcactcagcagaggggtccatcttgcttctgtcctacagaaagaatgtttgttagtacaatgggcactctgctttaggaggcgtagcaggcggcacaggcggatgaaaatcgccctccaccctcttctctgaaccgcacctcactgtgaccaggggcccagtgaagtggaagtggaatggcagtgaggtggcttctggcatctgagccacagcctgaccctcaccctctgctcccgcagcccttccccgtgcctctctcaaatgcctgacttctgaaaccactgactctgagccagatgaactcgtgttcccttctctagggcttttgctcacactgtggcccctgcttggatgccctcactccgtctgctggcctcatcccccctgtcgagggcctgctctagggccttgctttttatttccatgactggaattgaaatccctcccccaacccccagaaaagaaaacctcacgaaccgcatgagttcctctcttccagcactggccctttccagctcgcatttgatttctgtgtgctcatggcattttctaagcccattgagggtggggctcatgcttcatgcatcttggtgtccttggtgcccagcacctggcagagggaaggcactcaggagaggggctctcacggaggaaatgagtgggtgagagcctggctcacaggacatctgcgatccacatttgccctggagctgagggatcaaaactgccagcacatccctcagcacaggcctccagtcctgtaatggcccttggtctccatctggaatcttccatgaaactgaggccagccttgttctcagccaatcctactgtgtccaagggaggaggcggggagaggagtatggatgtcagtctggcagggttgagtgacagagcttgttacctagaaccttactgccctcctctctgacctccaggcaaaactatggctactacagcagatacccaggcagaaacatcgactctgagaggccccgaggctaccatcatccccaaggattcttggaggacgatgactcgcccgtttgctatgattcacggagatctccaaggagacgcctactacctcccaccccagcatgtgaggccagattttttgttttgggtggaacctcccggggaacagtgtacctctcccccaacccccgctctgggggccggtgatggatgtgtgctgccaggtcaggatccttagtcctcaagaccagcccccagccagagagtgtgtctgctttccttcctttctcatccatatctcacgtgatagagctctagcctcttcagtgctatgcttgactctctttgagaagagagaggctgtggggccctaagattgcacgcacacatctggtaaggggtgttttgcatacatagcattgtctttgaacctgggaccatcctgagagggaggcaaaccacacacatgcttttgctgttgtcagccctgctgcactctgtgatggggtgactgagcccccaaaggggaagagtgggctcaagtgcagagctggctgtgccgcaggcctgtcttgcaaaaccccatgcctctgagggccacctgggcattctggtgtccatctgtcctcaggcccctccaagccttatcctcctccctcatctctgctcctcctccctccctcatcttccctcctcctcctccatcttccctcctcctccctcatcttccctcctcctccctcatcttccctcttcctccctcatcttccctcctcctcctctatcttccctcctcctcctccatcttccctcctcctccatctttcctcctcctccctcatcttccctcctcctcctcctcccgcatcttctcctcctccctcatcttctcctgctccctcatcttccctcctcctcctccctcatcttccctcctcctccctccctcatcttccctcctcctccgttcctccctcatcttccctcctcctccctcatgttccctcctcctcctccctcatgttccctcctcctcctccctcattttctctcatcttccctcatcttcctcctccttcgtcttctagcatcttcctttatcttcctcctccctcatctaccctcctcctccttcttttccctccccctctcctccctcctcctccctcctccctcctccctcatcttccctcctcccccttcctctcccttgccttccctcctcctccctcactttctctgcttctccctcatcttcctgtcaagtctgtcagtgccctctgctcacggggcaggttctggacttgttggtccccttcactctggggccaggaaacccatcccacctagaggggctggggctggggctggctgcttccacctgctttccctctgcagcggtgggtggcaggagctggcggatctgggtcatcctgagcaaggaactccagctgggggaagaggtgcagccctggccccttccagcccttggctgaacagtttcattttggacatgtgggcattttgctgatggttaaggactatccatttctggaatttctgaggaatgaagcatatttttgaacaggactctaatcagtaaccaaaaatagccgtgacacatcggcttctgagtctgccaactgcatatactataaagagcaccactgggaggtgcccagggccctctgcctcactccaactgtcacagccccactggggagtgtgaccagacccatttccatggttaatatttaattcctcagccctgaacacatgcagctaaatgaagtcactcctttcccataaatactagatgaagcagatgcaggtgaggccgggtgatggccctcgcccttgtgagttccactgccttcctcgggcctcggcctttgtctactgcctacttggccaagcaagcaagcacatgaatcccaccagccacagtgccagagaggagctgagtgggcaggagtggctgtgctcttgattcataaggtggttttgctttgctgccccgcagctcagaccttggacaggaagaacatttccctcctccacctgtgttctcagctgcagggggattccctcctcctccagagagtgttgtgcagagcacatgagatggtggggatccctggagcattttagaaatggaaaagcaccacatacaggagagggaccgctgctctcctttcccagcccccagcccggccattcgatctggaaacctatgctccacagcacagttggcccctgggtggtgcgtggagggaaggctttctgatgaggcagccgtgtgtgtcccatgtaggcaactgaaccaggaggccccacagtgcgcactgggcacgagagaccaggactggctgtctcgttcctctctgctgggcagtgcctagccaaggactcagcccggtctcttgtgtgcagccccagtgtgcctgggagtcctcccctggctaggccctgggctttccaatagcggaatgaggggcatgtggagttttgccagggctgagaaaggaggccctgtgatccgagaaaagcagcggtcaagataggagccatagaaatgccttgtaaacgataggtgtgctctcgacagaggcccctgcaaggggtaggaggtttctgggaggaggctgctggctgtgtcttagggccccagaattcagactgatctcccgggcctggtgccctgtgaagctgggagctgtggattgtcttgttaacctctgtgtgagcctctgttggaagagctgttagcaggacaagcattttcttaaaattagaggtgtcctttgtttgtattcagtgctagagaagctgaatctttcccaacaaaaataatttgcttattacctggtcaagctgatcagtgcaggtaaagtccctccctttaaaacaggtgtaaacacaggagccccagcaagatatgtcagctgctggggacacttagggtatctggaaggtgacagtgggaagtgtcgtggggttctggcaggacttgtgttcttgcactgaagtgctgtgcgctccccacagtatgcagggccagggcttctgactcggatcagttgccctatgggctgccttcactcctcctcctgagaacaggcgaacgtttaaaagtagtaagttctctttgggaggctgaggcgggtggatcacgaggtcaggagatcgagaccatcctggctaacacggtgaaaccctgtctctactgaaaatacaaaatagtagccgggcgtggtggcgggcgcctgtagtcccagctactcgggaggctgaggcaggagaatggcgtgaacccgggaggtggagcttgcagtgagctgagattgcgccactgcactccagcctgggcgacagagccagactccatctcaaaaaaaaaaaaaaagtagtaagtttgtactttaaaaaacatccctcactggggcttctgccttcatcctctcctactaaagtttggagacctcactacctaatctttctcttggacaaaccgcatgcttcttcctgggctcgttgctgagcatccggggccaccctgactctgaaagacggtgtcccggcagagaacttgcttcacagctgtgtgatgccctttgctttcccagcccaccggagatcctccttcaactttgagtgcctgcgccggcagagcagccaggaagaggtcccgtcgtctcccatcttcccccatcgcacggccctgcctctgcatctaatgcagcaacaggtgagcggcccacctggccttgcccccacacctaggggcaccccacataggacccccatcaggtcactcccttctccttggccttaagcaccaggagggaaggagagaatcttcacctacagtctagttaatctttgtaacaatcctgtcaaatagctatggccatgagtcccatgctgcccaagctcacacaagtgactgctggcatttgaatccagggagccagctgccaaagctggcctcactgcccaggtgcctccctgcgatccccaccacctcttcctggcattgaatacagagcctgatgtgatctgagctcagggagtgggggccacttggctgattctgaacaagcggtgcagcccttcattttctctaagaagtggttccttcattaagtttatgggtccctccatgggcagggccctgtgggtactatgcagggttaacctcccctgcctacaaagggagcagtctggggagaacagtttgcccacgttgagggcggctgcacaggcaagagggtggggccggagcccactcactagggctttccctcaaggataacaatatggcgctttttctttctgaaaatatcacatcagagatgccattcattcgtgcacgacagggtggtgggcatggacctgtgctgtttacagacagcgttccccgtccctctctgcagagtgtgaaccccaaggtgcatctgccgtggtgggattgtaagaccggggcttgtacccagtgctttagcacatgccaaatgccggctctaggatgcattactccagagcaaagagaaccagctgttttcctataagtgctgggaagtggtagtttcccctgaatgtacttcggtatttaaacccagcatgaactgggtggtgtgttcacacccacagcttgttgggcttccctgattcttcattctgaagcaatttcatgaattagcaactgatacctccttgggaaaagccaaaggaaatgcattatggattcggggtaaaagaaagcacagtctgctagaaaacaaagtcatcaccgcccattcattcagcgtacttcagtgtgcccatgtcctttccaagtccttgcctggactgcccctggcgagcgcagcgccggtgcttggtctgtgcgcagaaggtttgaggcccggacctctgagaacctctggtctcccaacagtcccctctttcctcagatcatggcagttgccggcctagattcaagtaaagcccagaagtactcaccgagtcactcgacccggtcgtgggccacccctccagcaacccctccctaccgggactggacaccgtgctacacccccctgatccaagtggagcagtcagaggccctggaccaggtgaacggcagcctgccgtccctgcaccgcagctcctggtacacagacgagcccgacatctcctaccggactttcacaccagccagcctgactgtccccagcagcttccggaacaaaaacagcgacaagcagaggagtgcggacagcttggtggaggcagtgagtacggttcttggccgtggtgggcaggaagcaccaggagcagcagaggtgcaactgtaacagcaggaagggcagtggtgggagggcggccaggctgtgagctaggctgcctcaatcagacacttctgagcagcaggaatgtacctgaagcatgagtaaaaactggtcaccaccactggctgcagtggcttacgtctgtaatctcagcactttgggaggccgaggcgggtggatcacctgaggtcagcggctcaaagaccagccttgccaacatggtgaaaccccgtctctactaaaaatacaaaaattagccgggcgtggtggtgtatgcctgtaatcccagctactcaggaggctgcagcaggagaactgcttgaacccgggaggtggaggctgcagtgagccgagatcacaccactgcactccagcctgggccacagagcgagactcttgtctcaaaaaaaaaaaaaaaaaaaacaaaaaacaaaaactggtcaccaccgtcaattctcataaatgagctgtgctggcattatgggtgctgttccggcatatgtttctagtttatactaaatgtctttccccagtgggtttcactcttgttgggccatgtgtagttttttagctccaggacattttcaaagccatttacactagttattatgtatgaggtctagaaaacatgattgagctgcatccccaaagcacacggtgcagttaagttagcactggagttgatttttctgtcgtccccctgccctgcaaagccttataacacccccatgccatccatccctcttttctgtacaggtcctgatatccgaaggcttgggacgctatgcaagggacccaaaatttgtgtcagcaacaaaacacgaaatcgctgatgcctgtgacctcaccatcgacgagatggagagtgcagccagcaccctgcttaatgggaacgtgcgtccccgagccaacggggatgtgggccccctctcacaccggcaggactatgagctacaggactttggtcctggctacagcgacgaagagccagaccctgggagggatgaggaggacctggcggatgaaatgatatgcatcaccaccttgtagcccccagcgaggggcagactggctctggcctcaggtggggcgcaggagagccaggggaaaagtgcctcatagttaggaaagtttaggcactagttgggagtaatattcaattaattagacttttgtataagagatgtcatgcctcaagaaagccataaacctggtaggaacaggtcccaagcggttgagcctggcagagtaccatgcgctcggccccagctgcaggaaacagcaggccccgccctctcacagaggatgggtgaggaggccagacctgccctgccccattgtccagatgggcactgctgtggagtctgcttctcccatgtaccagggcaccaggcccacccaactgaaggcatggcggcggggtgcaggggaaagttaaaggtgatgacgatcatcacacctgtgtcgttacctcagccatcggtctagcatatcagtcactgggcccaacatatccatttttaaaccctttcccccaaatacactgcgtcctggttcctgtttagctgttctgaaatacggtgtgtaagtaagtcagaacccagctaccagtgattattgcgagggcaatgggacctcataaataaggttttctgtgatgtgacgccagtttacataagagaatatcactccgatggtcggtttctgactgtcacgctaagggcaactgtaaactggaataataatgcactcgcaaccaggtaaacttagatacactagtttgtttaaaattatagatttactgtacatgacttgtaatatactataatttgtatttgtaaagagatggtctatattttgtaattactgtattgtatttgaactgcagcaatatccatgggtcctaataattgtagttccccactaaaatctagaaattattagtatttttactcgggctatccagaagtagaagaaatagagccaattctcatttattcagcgaaaatcctctggggttaaaattttaagtttgaaagaacttgacactacagaaatttttctaaaatattttgagtcactataaacctatcatctttccacaagatataccagatgactatttgcagtcttttctttgggcaagagttccatgattttgatactgtacctttggatccaccatgggttgcaactgtctttggttttgtttgtttgacttgaaccaccctctgaagtaagtaagtgaattacagagcaggtccagctggctgctctgccccttgggtatccatagttacggttttctctgtggcccacccagggtgttttttgcatcgctggtgcagaaatgcataggtggatgagatatagctgctcttgtcctctggggactggtggtgctgcttaagaaataaggggtgctggggacagaggagcaacgtggtgatctataggattggagtgtcggggtctgtacaaatcgtattgttgccttttacaaaactgctgtactgtatgttctctttgagggcttttatatgcaattgaatgagggctgaagttttcattagaatgcactcacactctgactgtacgtcctgatgaaaacccacttttggataattagaaccgtcaaggcttcattttctgtcaacagaattaggccgactgtcaggttaccttggcagggattccctgcaatcaaaaagatagatgataggtagcaattttggtccaaaatttttaatagtatacagacaacctgttaatttttttttttttttttttttttgtaaataacaaacaccactttgttatgaagaccttacaaacctcttcttaagacattcttactctgatccaggcaaaaacacttcaaggtttgtaaatgactctttcctgacataaatccttttttattaaaatgcaaaatgttcttcagaataaaactgtgtaataatttttatacttgggagtgctccttgcacagagctgtcatttgccagtgagagcctccgacagggcaggtactgtgccagggcagctctgaaattatggatattcttatcctcctggttccttcggtgccaatggtaacctaataccagccgcagggagcgccatttctcctaaagggctacaccactgtcaacattatcctggactctgtgtctctctctgttgggtcttgtggcatcacatcaggccaaaattgccagaccaggaccctaagtgtctgatagaggcgatgatcttttccaaagtcagtacttacaaactggcattcttacaggctgcaccatttcctagtatgtctgctttaagcctggttcaacctctcatcgaatattaaatttttctttgtaagaaaaatttgaagttgtagagcatggttttttgttttcctttgtcttaggaaagttttaagatgaaatgtttttcctttttggtcccctccccatctgaaaaacacacatttttgtgtccacaggaataacacatttagtttctttagtcttatgtttttcataatctcacaaaatgtaaatggcagctatgatttcaccgtcaactggcagcgagaacctcactaagaaccatctctgctcagcctatggactccgacatccacccagacagctggatctcgcttcaccatgtggcactttccagctctatcctacgaagtttcagaattgggcgaaggccaggcgtggtgggctgtgagggccacgttacctctcggtgcagtctcacctgtgtgagatgggaccaggggcaccacttgctttcctgctgaccctgctatgagaaaaactggagcagtttcaccttgtgtacttctcagcatcgtaagtgtctttgccaattgcatttcctagaaaagttgtactgttttgataggcagctggctggtttagaaaaaccagttagccatagaactgacatcacgcagagagccccgactccctgattagcccaccccaactcaaaatctgactccagggatgttttgttgaaaatgttatttctctaaaacagtatttcttttcctctcctggggactaggagggcaggagacaatgaggagcaggcctgggccctggttccaacatcaagagtgacagggtggtctcagggatgtcctgtgagggcagcctgagccactaaacaggtccagtagagatggtattttatctttaaaaaatctgtattggatctgatgttaagttggcttatcagtagaagcatgaaaccacttctgagtggcgggacatggttggctggagaagaatctgtttttttgttgtttttttttgagacagtctcactctgtcacccagggtggagtgcagtggtgcaatcttggctcactgcagcctgcgccacccaggttcaagcgattctcctgtatcggcctcccaagtagctgggactacaggcgtgcaccaccatgcccagctaatttttgtatttttagtagagacggggtttcaccatgttggccaggctggtctcaaactcctggcctcaagtgatccacccacctcagccttgcaaagtgctgggattacaggcgtgagccaccatgcctagccaagaagaatctatttgaattcgtggagatgatgcctgcaaccttcgctacaagcagaaagactagatgtttgggtgcctacaactcctgcttcaggaactcaccatctccagtcaggctgccagatgctcttggctcccacacagcccacccctatcccctattccatcaggagctgccttctactagtgcagcggcttcaacacaggcttctgcaataggtcagggctcctgagagcactgggcacatggacagcgcattctgttgtgctctttgagccatttttgcaaagcacgtttctctgtttttaggtactgcaagcttttggccaaggggcccaattccctatgagactgaagatgggggggtaccctctgtgcaccccactttgtagcaagtgcctttctcccccatgctggcttcctcaggtgacagcctctcctcctggggtgaatgaaagactcccttcatggcaggggaacgctcaggttctggacatgtgacacttaccatcttttcttttgaacctcattcctgtttatggccaaattgtgcgattgtgtagaacatggctaagtatttgagagtgaaagaagggcctgggtgcaattgagcagcatcaccaatgggctcctcttaccatatgacgttttgcttattttaaaatacagccaccagactgaacccaccatggtctcagacactgacacacccatgggacacagagatggtagaactaagtgactgtcaccctgccatatccatacctgttccagagaagaagggtcagcacagtcatggttggtccaggactatcccctgcccctgaatccacacacgctccagcaggaaagctgcacgaggccctccaagttacggggctggcacctgaactcctgtttctgcactcttgcaggcagccccgagacccaggtgactgatggccatggactgctgctgtggggcaggtggggaccctccgtaggagaaataagtctcttggccggtttagaattttttttcttgaccctctcttcgaacaaaaattttaaaaaatacaggtaagattaaacaagagctgcttaagatttttaaaaggagaggtgtgatgggtttcttcctgctgcctctctcgaaggtttttctcagaaaactaacttgtggctgtcggacgcccccccccccggccccagtctgtaagccgccccaatcctctcagatccgagcaaagcctggaatcccccaatttcctcccgtccttattctgggcctagtatagctgcaggtttccacgcaacaatgcttttcttcccagcccttgacggtggatgtggatgtctggaaaaatccaagtgcattttattttcattaccttgtcagaacagtctggagaaggcatctcagttcaaatgtgagtgactggatcactttattgaatggtaagaaatttaaagagcaaagagctgttgtaaatgctacttgtattttttttcctccaaaactccagtcttgaatttatttttctttcacacaggggcatttctacagccacagggtgcatggctgtgcttaactgtgttttccatcctagtctgttcctgtggacgtctacagaataagaattaaccatccttgtccactgctgggatggctcaggctgccaagtcatttcccaagaccagtatgagagagtcctttctcgggctagctgcttcagtaggaatcagtgatctggtacgtggggtttgctcttggtttctgcatttcttggtaaaaggaaaaccttttaaaatgctaagtcataaaacctttggtagtgaagccaagcggcattccctccagactcctctccccttgaataaggtccataaaaatctcaggtttttttttttttttttttttttgagacagggtctcaccctgtcacccaggctggagtgcagtggtgccatcagggttcacaggagcctcaacctcctgggctaaagccatcctcccgcctcagcctcccaagtagctgggactacaggtgtgtaccaccatgcccagctaattgttttccagagacaaggtctcactatgttgcccaggctggtcttgaactcctgagctcaagtgaccttcccaaagtgctgggattacaggtgtgagccctgcacctggccctggtttaataagaaccagagccacaaccctctcagagtgacccagtggagccccagttacctgcctcactctgagagtgaaattaggcagcgagaaaggaaaagccagtttttcaaccagcaggcaactttcccctctcaacagggacactggggacttatgtgccagcccaggctgaactaactactgtgtgacttactgcctcagctaaagcttgcagctcaagaaggaggatgccccttccttcgcgaaccctccgtgggtctggcaggcacccagcctctgtgcatggcctgggaaggaaccactgccctgggttagagaatgccacgtgaacacaagaaaaaggatgcggcaggagttaaccatcctccccttctgtccctccaggaggcagggaggaacatctcaggctgaatgctggccttccccaaatggcccacagggaaaggctggggaaaaggagctggattcactgcccagtacttgtctcatttcccaagactttatccaattctcagccactgagtagggtaccacctgggtcctagtgtgctagatagtttcaggcaggagcctgggagcaagggctgtgctggccctcttggcttatcagggggcttccctggtcatcctccagcagcaactgtcttagcgctgggtggccagcgtcctgggcttgtagacagggacatctttgtcccagagtgcaggctgccccttgataatgtcagctgccttctctgcgatcatgattgtgggggcgttcaggttgccgctgaccatgctaggcatgatggaggcatcgacgaccctgaggttttccaccccgaggacccttgtctgcggatccaccacggcagtgggatcggagggctggcccatcttacaggtgcacgaggggtggtaggcgctgtcggcttttgcccgcacaaaggcatctatctctttatctgactgaatgtggcttcctggctggagctctttccctcggaacggagccagggcttcctgtgcaaaaatttctctggtgagcttcacacacagacggaaatcctcaatatcagtttctgtcgaggagaagaaacaggtgaggacccctccttttgcccgtgctggcctcactggaagattcacggcatggagaggctctgtaagctgtctgaggggatggtgtttggggacaaagttcagggccatgggggactgagccagcaggctgcttgtccctgcccacagcgggttagactgtaccgtgtagctcaaaggtagcatcctacacggacacagcccacccagaggcccaggtttaaatcagggatctgacttatctgtagggcagggataagtacacacaccctgcccctgctacagtggggctgtgagcaccctgcagccactgctgggcaaaacctgcccagtgggtagtgctcgtttttgctgcatgcaaagaggcaggcccaggaatggaatttgcttttagagactgctcagagtgacaacaggaaaaatgctctacctacagacctggcacctgcatggcgtggtctccctgcacatcatggcagattgttctgaaagctgaaaatctcccctactgtctaaaccctgggacttcatttatctcatgtgtcccaggacactacggggctgcctatgcaagtttacagcctaaagtgacacggtgggggacgacagagggtcacttgtgtcctagaaagtgtagtccaagggtatgattcagggataaacaggaaccccacaaaggcattcgtttgttcaagcccaggaagacacaggtgggtgaagtacctgttgacaagtagttgggctggatcacagggtggtcttggggattggcacttctcagtttgagccagcccacactcgtgccccgcatgggccccacatgtacctagaagaacacagaggaagcagtgacggtccctccatagacatccacagtgacctctgtcaaccctggtttacctgtagggtgggcctctgcttccagaatcagtggggaacagatgcatgttagcatttgcccgcatggtacccacctccacgagtgattacagaccacctcaaggaatcactctttcatcctggcctcatactccatggctcaaagctttcagaggtggtgatcccagagccaagtcagcccctctgtttgtcccatttctggtgctcggtacctagcctgcatgaaacagtcataccattggcatgcaccacgcagactgacacgctgggcagctggaaggcaggggacaggcctctgtgtcccccactctgcagccatatggcaccagggagaatgctgccttggaagatgggagcatcttccttcctggtgggaaggagacatcctgggaagccgaggctcttccacctgctcacctggtaagcctcctgctgggtggggacccgcccgtggtcaatcacttgggatggcaggaaatggaactggatgtccgggtgggggaccccaggctggctgcggatgaacccacctgtttccagatgggcagtggctccctcccctgagaagcagaagaggatgaggcagaagagccagtcaggccgtggcaggtgggccggctgctcctggtttccctcctttctcctggccgctcctcttccttttcccggactccactctagtgcctggacccaagtcctgtccacatctgttcacccctcacagggggctcacccagcaccacaccataaaatgtcagctatttgccaaaaggatggcatcagctctgctctctaccagggccaattctgccactgcccatgccacctgccttaccggctcttcccactacctagcacagcacacagcacatactaggtgtgtgagaaatacagactgagtggatgggtaggattttaaactaccagttcctggcccaggcacagctagaaatcaaatggaaaaggttgaaagatgaatgctgattctgcagtctagccccaaagtctcctctctccaccttttctcctggctccttggacctcacctgctgtccagcacaaggccatccctgctcatccgtaaggaggagcagcccctaagccccgaggagtctcacctccagcaggccctgggccaagctccttggcatgtgctattgtttctggtcctcgcttcaacctgtcaggttgaaactgtgcatccccattttgaagatggaaaaactgaggctcagggctaaggtaaatggcatagttccgcatcaaacccagtggccagaacccctgttcagctcctcaggaaggaggtctcaatgcttataggcagtctcctcccaggttactggtaagcgtgctcacctgtgaatttccagagccactccagaccaatgcagaccttccgcaggggcttctgtgctgaatggagggtgatagggcgggtgcatgcctgctgaatgtagatctccaggtggtcttgcaggttctggccaacccctgatacgggaaggagtggtttagaaaatggctaccaagggggctcagctgcttctcaatatccccccggttttgaaaaattctttcctattcccttatcttctggaccagctcctgctcagttccctggtctcagcttaaaggctgcctcccagagacactatgtgtgcactcctggccaagtctggcctgcctcggatgctgccaaggccacctgtccttgtcactcactcctacggcagcctctgggtgccccttgtcagccctgctcagcagccccctctgtgagggcagggcctacgccttcagcaggcactgcttggtgagcggttgctggatggtgatggccagaggggcagacagcagccccaccctcacgccagcgtggggaaggaggaagcagccctgtcgtgctacaccgtccttgcatgaattcatccaagcctattgggacactgggcaggtcaacatcatgaagcagcacttccccgggcccctcatgatgaagcctaaaggcacaaaggcctagccctcccggagtggggttatcaaggagggcaagagacagagcccgaccctcaagagcatcagagacagtttataaaacaaagtttacatcttaacatgaagagcaggctctggagcacggagctgacctcattcatgctcagggcagccagcgagtcctgtggatggaaggacgaggcctggacccctctcgccatagagctgccctggtgacacgcccatgcccgacccagtggggcttcagggcagatactccctgctgcagggtgcccttctccaaatgaaatagggcagccggaggagggagaaggaaaacaatgcaagactcggggcccagggatgacagtgtccagtgaggcctgggaaaccttcgggctctcggggacaatgtgatagttccaaggatcactgactgccaccacctccccacttcatgctaataagatacatacactaagccttttgttgagcagagacagcctctggggagcagtaaagaaggggactcaccaggtaggtggcacaccacagggatgcccagtttcttgaggtcatcagcattcccgatgccagagagcatgagcagctgtggagagttgatggcacctccactcagaatcacctccttgctggcataagcctggaagaggtccagccaggtcactccctgaaaagccagctgttctcctgactcacagaccagcgccctactctagccagcaccatgagaacacagccttgggatgtagaatcctgtggcacacccgggacaggccccagagctaaggagaggaaactcactgagtcactacttgaaagcaaccagcaggtgcaactacagctggacagtagtgacagccttagaaacaggaggggagggcttacatgagataaatgaaagcaggcattcaagtgggtggtttagagagagcaagcggtgaaccagatctacacatgaagctgcaaaacaatcagaccccctgccaacaacacagaaatagagtacaatcacatttatgggttttaaaacctctagtgtaaacctatagctttaaacctatagctttctgtgacatcggtgccttgaaatggtgtggaaggtactgggggagagctctgaattaggcatggcacacaggggcactgacaccataggccctttctcggtggcaggactaggggcttcttcacctccaccagcccactgccatcagctactcgcccctccccccgccatcacagggatgagcacgtgggtctgggggtgagggcgtgactcctgcccactctgagctggaccaccagggtcactgcccacccccttcttccaggaccccagctgcagtccactcaccctgtggctctggccattcttgacatactccacgcccactgcacgggtgccctcaaatagcaccctgctcacaagcgtctcggcctcggccttgaggttggtgcggctcagtgctgggtgcaggtaggcacaggctgcgctccaccgtttgcctgcaggatggagtgaggtggtcaggcatggctccgccctcccctggcacctgggcaggaggaaggagctggagaaagaaagagtggatatgcccagctctgactgcaagtcccgccttcaaagtaaagctgagacggaaagaccctgcaagaccctgccctactgagtccacatctgcctggggtcccctggaggcaggtggaaaagtacccttcaccctcaaacaggaggacacagagaccaggagcacagccagaggggtgagagccttcaagaggcaggcagaagccccgggtcagccctggctcgcctctgtcctgctgtgagcaaggcccttcaccactctgtgcctcagtttccccatgtgcaagtccctagaggagttaggctctctgtccagagagctgattctctgttatccacaccaacaggggccagaggtgcagagaacgcccagggtcaccatcctgggtcactctcagggctctgggttgtactcttggaggggtatactaagccagatctcttcccggtcgtgccagcctcagtctgcccatgcctcctgaccatgctggagccaggagcctggagccacgggccaagatgggtgggggctggggtagggggtagtgcttttttaaaaagagaagggagaccactaccttcatggatggtcatgtccatccagccgaagccctcctgctggaagccattcatgtcctcggtgagcgggtagccggcctgctgcgtggcctccaggaatgcgcagtgcagcgggtggttggtcttgccccgggacacccgcagcgggccatcggcgccccggtaccggctggcgcccagctcgtggccctgcgccttgcggaagtagggcaggcagtgcgcgtagtcccagccgcgggcgccctggcgctgccagcgctcgtagtcctcggcgtgcccacggacgtagaccatggcattgagggatgaggagccaccccagacgcggccgcgtggccagtacagcacgcggccgtccaggccccgctgcacctctgtgtggtagcaccag

SEQ ID NO: 1212 - DNA, 8833 bp, Homo sapiens
agaataagggcagggaccgcggctcctacctcttggtgatccccttccccattccgcccccgccccaacgcccagcacagtgccctgcacacagtagtcgctcaataaatgttcgtggatgatgatgatgatgatgatgaaaaaaatgcagcatcaacggcagcagcaagcggaccacgcgaacgaggcaaactatgcaagaggcaccagacttcctctttctggtgaaggaccaacttctcagccgaatagctccaagcaaactgtcctgtcttggcaagctgcaatcgatgctgctagacaggccaaggctgcccaaactatgagcacctctgcacccccacctgtaggatctctctcccaaagaaaacgtcagcaatacgccaagagcaaaaaacagggtaactcgtccaacagccgacctgcccgcgcccttttctgtttatcactcaataaccccatccgaagagcctgcattagtatagtggaatggaaaccatttgacatatttatattattggctatttttgccaattgtgtggccttagctatttacatcccattccctgaagatgattctaattcaacaaatcataacttggaaaaagtagaatatgccttcctgattatttttacagtcgagacatttttgaagattatagcgtatggattattgctacatcctaatgcttatgttaggaatggatggaatttactggattttgttatagtaatagtaggattgtttagtgtaattttggaacaattaaccaaagaaacagaaggcgggaaccactcaagcggcaaatctggaggctttgatgtcaaagccctccgtgcctttcgagtgttgcgaccacttcgactagtgtcaggagtgcccagtttacaagttgtcctgaactccattataaaagccatggttcccctccttcacatagcccttttggtattatttgtaatcataatctatgctattataggattggaactttttattggaaaaatgcacaaaacatgtttttttgctgactcagatatcgtagctgaagaggacccagctccatgtgcgttctcagggaatggacgccagtgtactgccaatggcacggaatgtaggagtggctgggttggcccgaacggaggcatcaccaactttgataactttgcctttgccatgcttactgtgtttcagtgcatcaccatggagggctggacagacgtgctctactgggtaaatgatgcgataggatgggaatggccatgggtgtattttgttagtctgatcatccttggctcatttttcgtccttaacctggttcttggtgtccttagtggagaattctcaaaggaaagagagaaggcaaaagcacggggagatttccagaagctccgggagaagcagcagctggaggaggatctaaagggctacttggattggatcacccaagctgaggacatcgatccggagaatgaggaagaaggaggagaggaaggcaaacgaaatactagcatgcccaccagcgagactgagtctgtgaacacagagaacgtcagcggtgaaggcgagaaccgaggctgctgtggaagtctctggtgctggtggagacggagaggcgcggccaaggcggggccctctgggtgtcggcggtggggtcaagccatctcaaaatccaaactcagccgacgctggcgtcgctggaaccgattcaatcgcagaagatgtagggccgccgtgaagtctgtcacgttttactggctggttatcgtcctggtgtttctgaacaccttaaccatttcctctgagcactacaatcagccagattggttgacacagattcaagatattgccaacaaagtcctcttggctctgttcacctgcgagatgctggtaaaaatgtacagcttgggcctccaagcatatttcgtctctcttttcaaccggtttgattgcttcgtggtgtgtggtggaatcactgagacgatcttggtggaactggaaatcatgtctcccctggggatctctgtgtttcggtgtgtgcgcctcttaagaatcttcaaagtgaccaggcactggacttccctgagcaacttagtggcatccttattaaactccatgaagtccatcgcttcgctgttgcttctgctttttctcttcattatcatcttttccttgcttgggatgcagctgtttggcggcaagtttaattttgatgaaacgcaaaccaagcggagcacctttgacaatttccctcaagcacttctcacagtgttccagatcctgacaggcgaagactggaatgctgtgatgtacgatggcatcatggcttacgggggcccatcctcttcaggaatgatcgtctgcatctacttcatcatcctcttcatttgtggtaactatattctactgaatgtcttcttggccatcgctgtagacaatttggctgatgctgaaagtctgaacactgctcagaaagaagaagcggaagaaaaggagaggaaaaagattgccagaaaagagagcctagaaaataaaaagaacaacaaaccagaagtcaaccagatagccaacagtgacaacaaggttacaattgatgactatagagaagaggatgaagacaaggacccctatccgccttgcgatgtgccagtaggggaagaggaagaggaagaggaggaggatgaacctgaggttcctgccggaccccgtcctcgaaggatctcggagttgaacatgaaggaaaaaattgcccccatccctgaagggagcgctttcttcattcttagcaagaccaacccgatccgcgtaggctgccacaagctcatcaaccaccacatcttcaccaacctcatccttgtcttcatcatgctgagcagcgctgccctggccgcagaggaccccatccgcagccactccttccggaacacgatactgggttactttgactatgccttcacagccatctttactgttgagatcctgttgaagatgacaacttttggagctttcctccacaaaggggccttctgcaggaactacttcaatttgctggatatgctggtggttggggtgtctctggtgtcatttgggattcaatccagtgccatctccgttgtgaagattctgagggtcttaagggtcctgcgtcccctcagggccatcaacagagcaaaaggacttaagcacgtggtccagtgcgtcttcgtggccatccggaccatcggcaacatcatgatcgtcaccaccctcctgcagttcatgtttgcctgtatcggggtccagttgttcaaggggaagttctatcgctgtacggatgaagccaaaagtaaccctgaagaatgcaggggacttttcatcctctacaaggatggggatgttgacagtcctgtggtccgtgaacggatctggcaaaacagtgatttcaacttcgacaacgtcctctctgctatgatggcgctcttcacagtctccacgtttgagggctggcctgcgttgctgtataaagccatcgactcgaatggagagaacatcggcccaatctacaaccaccgcgtggagatctccatcttcttcatcatctacatcatcattgtagctttcttcatgatgaacatctttgtgggctttgtcatcgttacatttcaggaacaaggagaaaaagagtataagaactgtgagctggacaaaaatcagcgtcagtgtgttgaatacgccttgaaagcacgtcccttgcggagatacatccccaaaaacccctaccagtacaagttctggtacgtggtgaactcttcgcctttcgaatacatgatgtttgtcctcatcatgctcaacacactctgcttggccatgcagcactacgagcagtccaagatgttcaatgatgccatggacattctgaacatggtcttcaccggggtgttcaccgtcgagatggttttgaaagtcatcgcatttaagcctaaggggtattttagtgacgcctggaacacgtttgactccctcatcgtaatcggcagcattatagacgtggccctcagcgaagcagacgtgatgatgcgattggtgaagcttctcagcaggggggaaggcatccggacattgctgtggacttttattaagtcctttcaggcgctcccgtatgtggccctcctcatagccatgctgttcttcatctatgcggtcattggcatgcagatgtttgggaaagttgccatgagagataacaaccagatcaataggaacaataacttccagacgtttccccaggcggtgctgctgctcttcaggtgtgcaacaggtgaggcctggcaggagatcatgctggcctgtctcccagggaagctctgtgaccctgagtcagattacaaccccggggaggagtatacatgtgggagcaactttgccattgtctatttcatcagtttttacatgctctgtgcatttctgatcatcaatctgtttgtggctgtcatcatggataatttcgactatctgacccgggactggtctattttggggcctcaccatttagatgaattcaaaagaatatggtcagaatatgaccctgaggcaaagggaaggataaaacaccttgatgtggtcactctgcttcgacgcatccagcctcccctggggtttgggaagttatgtccacacagggtagcgtgcaagagattagttgccatgaacatgcctctcaacagtgacgggacagtcatgtttaatgcaaccctgtttgctttggttcgaacggctcttaagatcaagaccgaagggaacctggagcaagctaatgaagaacttcgggctgtgataaagaaaatttggaagaaaaccagcatgaaattacttgaccaagttgtccctccagctggtgatgatgaggtaaccgtggggaagttctatgccactttcctgatacaggactactttaggaaattcaagaaacggaaagaacaaggactggtgggaaagtaccctgcgaagaacaccacaattgccctacaggcgggattaaggacactgcatgacattgggccagaaatccggcgtgctatatcgtgtgatttgcaagatgacgagcctgaggaaacaaaacgagaagaagaagatgatgtgttcaaaagaaatggtgccctgcttggaaaccatgtcaatcatgttaatagtgataggagagattcccttcagcagaccaataccacccaccgtcccctgcatgtccaaaggccttcaattccacctgcaagtgatactgagaaaccgctgtttcctccagcaggaaattcggtgtgtcataaccatcataaccataattccataggaaagcaagttcccacctcaacaaatgccaatctcaataatgccaatatgtccaaagctgcccatggaaagcggcccagcattgggaaccttgagcatgtgtctgaaaatgggcatcattcttcccacaagcatgaccgggagcctcagagaaggtccagtgtgaaaaggtccgactcaggagatgaacagctcccaactatttgccgggaagacccagagatacatggctatttcagggacccccactgcttgggggagcaggagtatttcagtagtgaggaatgctacgaggatgacagctcgcccacctggagcaggcaaaactatggctactacagcagatacccaggcagaaacatcgactctgagaggccccgaggctaccatcatccccaaggattcttggaggacgatgactcgcccgtttgctatgattcacggagatctccaaggagacgcctactacctcccaccccagcatcccaccggagatcctccttcaactttgagtgcctgcgccggcagagcagccaggaagaggtcccgtcgtctcccatcttcccccatcgcacggccctgcctctgcatctaatgcagcaacagatcatggcagttgccggcctagattcaagtaaagcccagaagtactcaccgagtcactcgacccggtcgtgggccacccctccagcaacccctccctaccgggactggacaccgtgctacacccccctgatccaagtggagcagtcagaggccctggaccaggtgaacggcagcctgccgtccctgcaccgcagctcctggtacacagacgagcccgacatctcctaccggactttcacaccagccagcctgactgtccccagcagcttccggaacaaaaacagcgacaagcagaggagtgcggacagcttggtggaggcagtcctgatatccgaaggcttgggacgctatgcaagggacccaaaatttgtgtcagcaacaaaacacgaaatcgctgatgcctgtgacctcaccatcgacgagatggagagtgcagccagcaccctgcttaatgggaacgtgcgtccccgagccaacggggatgtgggccccctctcacaccggcaggactatgagctacaggactttggtcctggctacagcgacgaagagccagaccctgggagggatgaggaggacctggcggatgaaatgatatgcatcaccaccttgtagcccccagcgaggggcagactggctctggcctcaggtggggcgcaggagagccaggggaaaagtgcctcatagttaggaaagtttaggcactagttgggagtaatattcaattaattagacttttgtataagagatgtcatgcctcaagaaagccataaacctggtaggaacaggtcccaagcggttgagcctggcagagtaccatgcgctcggccccagctgcaggaaacagcaggccccgccctctcacagaggatgggtgaggaggccagacctgccctgccccattgtccagatgggcactgctgtggagtctgcttctcccatgtaccagggcaccaggcccacccaactgaaggcatggcggcggggtgcaggggaaagttaaaggtgatgacgatcatcacacctgtgtcgttacctcagccatcggtctagcatatcagtcactgggcccaacatatccatttttaaaccctttcccccaaatacactgcgtcctggttcctgtttagctgttctgaaatacggtgtgtaagtaagtcagaacccagctaccagtgattattgcgagggcaatgggacctcataaataaggttttctgtgatgtgacgccagtttacataagagaatatcactccgatggtcggtttctgactgtcacgctaagggcaactgtaaactggaataataatgcactcgcaaccaggtaaacttagatacactagtttgtttaaaattatagatttactgtacatgacttgtaatatactataatttgtatttgtaaagagatggtctatattttgtaattactgtattgtatttgaactgcagcaatatccatgggtcctaataattgtagttccccactaaaatctagaaattattagtatttttactcgggctatccagaagtagaagaaatagagccaattctcatttattcagcgaaaatcctctggggttaaaattttaagtttgaaagaacttgacactacagaaatttttctaaaatattttgagtcactataaacctatcatctttccacaagatataccagatgactatttgcagtcttttctttgggcaagagttccatgattttgatactgtacctttggatccaccatgggttgcaactgtctttggttttgtttgtttgacttgaaccaccctctgaagtaagtaagtgaattacagagcaggtccagctggctgctctgccccttgggtatccatagttacggttttctctgtggcccacccagggtgttttttgcatcgctggtgcagaaatgcataggtggatgagatatagctgctcttgtcctctggggactggtggtgctgcttaagaaataaggggtgctggggacagaggagcaacgtggtgatctataggattggagtgtcggggtctgtacaaatcgtattgttgccttttacaaaactgctgtactgtatgttctctttgagggcttttatatgcaattgaatgagggctgaagttttcattagaatgcactcacactctgactgtacgtcctgatgaaaacccacttttggataattagaaccgtcaaggcttcattttctgtcaacagaattaggccgactgtcaggttaccttggcagggattccctgcaatcaaaaagatagatgataggtagcaattttggtccaaaatttttaatagtatacagacaacctgttaatttttttttttttttttttttttgtaaataacaaacaccactttgttatgaagaccttacaaacctcttcttaagacattcttactctgatccaggcaaaaacacttcaaggtttgtaaatgactctttcctgacataaatccttttttattaaaatgcaaaatgttcttcagaataaaactgtgtaataatttttatacttgggagtgctccttgcacagagctgtcatttgccagtgagagcctccgacagggcaggtactgtgccagggcagctctgaaattatggatattcttatcctcctggttccttcggtgccaatggtaacctaataccagccgcagggagcgccatttctcctaaagggctacaccactgtcaacattatcctggactctgtgtctctctctgttgggtcttgtggcatcacatcaggccaaaattgccagaccaggaccctaagtgtctgatagaggcgatgatcttttccaaagtcagtacttacaaactggcattcttacaggctgcaccatttcctagtatgtctgctttaagcctggttcaacc

SEQ ID NO: 1213 - protein, 2123 aa, Homo sapiens
MMMMMMMKKMQHQRQQQADHANEANYRTRLPLSGEGPTSQPNSSKQTVLSWQAAIDAARQAKAAQTMSTSAPPPVGSLSQRKRQQYAKSKKQGNSSNSRPARALFCLSLNNPIRRACISIVEWKPFDIFILLAIFANCVAIYIPFPEDDSNSTNHNLEKVEYAFLIIFTVETFLKIIAYGLLLHPNAYVRNGWNLLDFVIVIVGLFSVIQLTKETEGGNHSSGKSGGFDVKALRAFRVLRPLRLVSGVPSLQVVLNSIIKAMVPLLHIALLVLFVIIIYAIIGLELFIGKMHKTCFFADSDIVAEEDPAPCAFSGNGRQCTANGTECRSGWVGPNGGITNFDNFAFAMLTVFQCITMEGWTDVLYWVNDAIGWEWPWVYFVSLIILGSFFVLNLVLGVLSGEFSKEREKAKRDFQKLREKQQLEEDLKGYLDWITQAEDIDPENEEEGGEEGKRNTSMPTSETESVNTENVSGEGENRGCCGSLWCWWRRRGAAKAGPSGCRRWGQAISKSKLSRRWRRWNRFNRRRCRAAVKSVTFYWLVIVLVFLNTLTISSEHYNQPDWLTQIQDIANKVLLALFTCEMLVKMYSLGLQAYFVSLFNRFDCFVVCGGITETILVELEIMSPLGISVFRCVRLLRIFKVTRHWTSLSNLVASLLNSMKSIASLLLLLFLFIIIFSLLGMQLFGGKFNFDETQTKRSTFDNFPQALLTVFQILTGEDWNAVMYDGIMAYGGPSSSGMIVCIYFIILFICGNYILLNVFLAIAVDNLADAESLNTAQKEEAEEKERKKIARKESLENKKNNKPEVNQIANSDNKVTIDDYREEDEDKDPYPPCDVPVGEEEEEEEEDEPEVPAGPRPRRISELNMKEKIAPIPEGSAFFILSKTNPIRVGCHKLINHHIFTNLILVFIMLSSAAAEDPIRSHSFRNTILGYFDYAFTAIFTVEILLKMTTFGAFLHKGAFCRNYFNLLDMLVVGVSLVSFGIQSSAISVVKILRVLRVLRPLRAINRAKGLKHVVQCVFVAIRTIGNIMIVTTLLQFMFACIGVQLFKGKFYRCTDEAKSNPEECRGLFILYKDGDVDSPVVRERIWQNSDFNFDNVLSAMMALFTVSTFEGWPALLYKAIDSNGENIGPIYNHRVEISIFFIIYIIIVAFFMMNIFVGFVIVTFQEQGEKEYKNCELDKNQRQCVEYALKARPLRRYIPKNPYQYKFWYVVNSSPFEYMMFVLIMLNTLCLAMQHYEQSKMFNDAMDILNMVFTGVFTVEMVLKVIAFKPKGYFSDAWNTFDSLIVIGSIIDVSEADVMMRLVKLLSRGEGIRTLLWTFIKSFQALPYVLIAMLFFIYAVIGMQMFGKVAMRDNNQINRNNNFQTFPQAVLLLFRCATGEAWQEIMLACLPGKLCDPESDYNPGEEYTCGSNFAIVYFISFYMLCAFLIINLFVAVIMDNFDYLTRDWSILGPHHLDEFKRIWSEYDPEAKGRIKHLDVVTLLRRIQPPLGFGKLCPHRVACKRLVAMNMPLNSDGTVMFNATLFALVRTALKIKTEGNLEQANEELRAVIKKIWKKTSMKLLDQVVPPAGDDEVTVGKFYATFLIQDYFRKFKKRKEQGLVGKYPAKNTTIALQAGLRTLHDIGPEIRRAISCDLQDDEPEETKREEEDDVFKRNGALLGNHVNHVNSDRRDSLQQTNTTPLHVQRPSIPPASDTEKPLFPPAGNSVCHNHHNHNSIGKQVPTSTNANLNNANMSKAAHGKRPSIGNLEHVSENGHHSSHKHDREPQRRSSVKRSDSGDEQLPTICREDPEIHGYFRDPHCLGEQEYFSSEECYEDDSSPTWSRQNYGYYSRYPGRNIDSPRGYHHPQGFLEDDDSPVCYDSRRSPRRRLLPPTPASHRRSSFNFECLRRQSSQEEVPSSPIFPHRTALPLHLMQQQIMAVAGLDSSKAQKYSPSHSTRSWATPPATPPYRDWTPCYTPLIQVEQSEALDQVNGSLPSLHRSSWYTDEPDISYRTFTPASLTVPSSFRNKNSDKQRSADSLVEAVLISEGLGRYARDPKFVSATKHEIADACDLTIDEMESAASTLLNGNVRPRANGDVGPLSHRQDYELQDFGPGYSDEEPDPGRDEEDLADEMICITTL

SEQ ID NO: 1214 - DNA, 8926 bp, Homo sapiens
agaataagggcagggaccgcggctcctacctcttggtgatccccttccccattccgcccccgccccaacgcccagcacagtgccctgcacacagtagtcgctcaataaatgttcgtggatgatgatgatgatgatgatgaaaaaaatgcagcatcaacggcagcagcaagcggaccacgcgaacgaggcaaactatgcaagaggcaccagacttcctctttctggtgaaggaccaacttctcagccgaatagctccaagcaaactgtcctgtcttggcaagctgcaatcgatgctgctagacaggccaaggctgcccaaactatgagcacctctgcacccccacctgtaggatctctctcccaaagaaaacgtcagcaatacgccaagagcaaaaaacagggtaactcgtccaacagccgacctgcccgcgcccttttctgtttatcactcaataaccccatccgaagagcctgcattagtatagtggaatggaaaccatttgacatatttatattattggctatttttgccaattgtgtggccttagctatttacatcccattccctgaagatgattctaattcaacaaatcataacttggaaaaagtagaatatgccttcctgattatttttacagtcgagacatttttgaagattatagcgtatggattattgctacatcctaatgcttatgttaggaatggatggaatttactggattttgttatagtaatagtaggattgtttagtgtaattttggaacaattaaccaaagaaacagaaggcgggaaccactcaagcggcaaatctggaggctttgatgtcaaagccctccgtgcctttcgagtgttgcgaccacttcgactagtgtcaggagtgcccagtttacaagttgtcctgaactccattataaaagccatggttcccctccttcacatagcccttttggtattatttgtaatcataatctatgctattataggattggaactttttattggaaaaatgcacaaaacatgtttttttgctgactcagatatcgtagctgaagaggacccagctccatgtgcgttctcagggaatggacgccagtgtactgccaatggcacggaatgtaggagtggctgggttggcccgaacggaggcatcaccaactttgataactttgcctttgccatgcttactgtgtttcagtgcatcaccatggagggctggacagacgtgctctactgggtaaatgatgcgataggatgggaatggccatgggtgtattttgttagtctgatcatccttggctcatttttcgtccttaacctggttcttggtgtccttagtggagaattctcaaaggaaagagagaaggcaaaagcacggggagatttccagaagctccgggagaagcagcagctggaggaggatctaaagggctacttggattggatcacccaagctgaggacatcgatccggagaatgaggaagaaggaggagaggaaggcaaacgaaatactagcatgcccaccagcgagactgagtctgtgaacacagagaacgtcagcggtgaaggcgagaaccgaggctgctgtggaagtctctggtgctggtggagacggagaggcgcggccaaggcggggccctctgggtgtcggcggtggggtcaagccatctcaaaatccaaactcagccgacgctggcgtcgctggaaccgattcaatcgcagaagatgtagggccgccgtgaagtctgtcacgttttactggctggttatcgtcctggtgtttctgaacaccttaaccatttcctctgagcactacaatcagccagattggttgacacagattcaagatattgccaacaaagtcctcttggctctgttcacctgcgagatgctggtaaaaatgtacagcttgggcctccaagcatatttcgtctctcttttcaaccggtttgattgcttcgtggtgtgtggtggaatcactgagacgatcttggtggaactggaaatcatgtctcccctggggatctctgtgtttcggtgtgtgcgcctcttaagaatcttcaaagtgaccaggcactggacttccctgagcaacttagtggcatccttattaaactccatgaagtccatcgcttcgctgttgcttctgctttttctcttcattatcatcttttccttgcttgggatgcagctgtttggcggcaagtttaattttgatgaaacgcaaaccaagcggagcacctttgacaatttccctcaagcacttctcacagtgttccagatcctgacaggcgaagactggaatgctgtgatgtacgatggcatcatggcttacgggggcccatcctcttcaggaatgatcgtctgcatctacttcatcatcctcttcatttgtggtaactatattctactgaatgtcttcttggccatcgctgtagacaatttggctgatgctgaaagtctgaacactgctcagaaagaagaagcggaagaaaaggagaggaaaaagattgccagaaaagagagcctagaaaataaaaagaacaacaaaccagaagtcaaccagatagccaacagtgacaacaaggttacaattgatgactatagagaagaggatgaagacaaggacccctatccgccttgcgatgtgccagtaggggaagaggaagaggaagaggaggaggatgaacctgaggttcctgccggaccccgtcctcgaaggatctcggagttgaacatgaaggaaaaaattgcccccatccctgaagggagcgctttcttcattcttagcaagaccaacccgatccgcgtaggctgccacaagctcatcaaccaccacatcttcaccaacctcatccttgtcttcatcatgctgagcagcgctgccctggccgcagaggaccccatccgcagccactccttccggaacacgatactgggttactttgactatgccttcacagccatctttactgttgagatcctgttgaagatgacaacttttggagctttcctccacaaaggggccttctgcaggaactacttcaatttgctggatatgctggtggttggggtgtctctggtgtcatttgggattcaatccagtgccatctccgttgtgaagattctgagggtcttaagggtcctgcgtcccctcagggccatcaacagagcaaaaggacttaagcacgtggtccagtgcgtcttcgtggccatccggaccatcggcaacatcatgatcgtcaccaccctcctgcagttcatgtttgcctgtatcggggtccagttgttcaaggggaagttctatcgctgtacggatgaagccaaaagtaaccctgaagaatgcaggggacttttcatcctctacaaggatggggatgttgacagtcctgtggtccgtgaacggatctggcaaaacagtgatttcaacttcgacaacgtcctctctgctatgatggcgctcttcacagtctccacgtttgagggctggcctgcgttgctgtataaagccatcgactcgaatggagagaacatcggcccaatctacaaccaccgcgtggagatctccatcttcttcatcatctacatcatcattgtagctttcttcatgatgaacatctttgtgggctttgtcatcgttacatttcaggaacaaggagaaaaagagtataagaactgtgagctggacaaaaatcagcgtcagtgtgttgaatacgccttgaaagcacgtcccttgcggagatacatccccaaaaacccctaccagtacaagttctggtacgtggtgaactcttcgcctttcgaatacatgatgtttgtcctcatcatgctcaacacactctgcttggccatgcagcactacgagcagtccaagatgttcaatgatgccatggacattctgaacatggtcttcaccggggtgttcaccgtcgagatggttttgaaagtcatcgcatttaagcctaaggggtattttagtgacgcctggaacacgtttgactccctcatcgtaatcggcagcattatagacgtggccctcagcgaagcagacccaactgaaagtgaaaatgtccctgtcccaactgctacacctgggaactctgaagagagcaatagaatctccatcacctttttccgtcttttccgagtgatgcgattggtgaagcttctcagcaggggggaaggcatccggacattgctgtggacttttattaagtcctttcaggcgctcccgtatgtggccctcctcatagccatgctgttcttcatctatgcggtcattggcatgcagatgtttgggaaagttgccatgagagataacaaccagatcaataggaacaataacttccagacgtttccccaggcggtgctgctgctcttcaggtgtgcaacaggtgaggcctggcaggagatcatgctggcctgtctcccagggaagctctgtgaccctgagtcagattacaaccccggggaggagtatacatgtgggagcaactttgccattgtctatttcatcagtttttacatgctctgtgcatttctgatcatcaatctgtttgtggctgtcatcatggataatttcgactatctgacccgggactggtctattttggggcctcaccatttagatgaattcaaaagaatatggtcagaatatgaccctgaggcaaagggaaggataaaacaccttgatgtggtcactctgcttcgacgcatccagcctcccctggggtttgggaagttatgtccacacagggtagcgtgcaagagattagttgccatgaacatgcctctcaacagtgacgggacagtcatgtttaatgcaaccctgtttgctttggttcgaacggctcttaagatcaagaccgaagggaacctggagcaagctaatgaagaacttcgggctgtgataaagaaaatttggaagaaaaccagcatgaaattacttgaccaagttgtccctccagctggtgatgatgaggtaaccgtggggaagttctatgccactttcctgatacaggactactttaggaaattcaagaaacggaaagaacaaggactggtgggaaagtaccctgcgaagaacaccacaattgccctacaggcgggattaaggacactgcatgacattgggccagaaatccggcgtgctatatcgtgtgatttgcaagatgacgagcctgaggaaacaaaacgagaagaagaagatgatgtgttcaaaagaaatggtgccctgcttggaaaccatgtcaatcatgttaatagtgataggagagattcccttcagcagaccaataccacccaccgtcccctgcatgtccaaaggccttcaattccacctgcaagtgatactgagaaaccgctgtttcctccagcaggaaattcggtgtgtcataaccatcataaccataattccataggaaagcaagttcccacctcaacaaatgccaatctcaataatgccaatatgtccaaagctgcccatggaaagcggcccagcattgggaaccttgagcatgtgtctgaaaatgggcatcattcttcccacaagcatgaccgggagcctcagagaaggtccagtgtgaaaaggtccgactcaggagatgaacagctcccaactatttgccgggaagacccagagatacatggctatttcagggacccccactgcttgggggagcaggagtatttcagtagtgaggaatgctacgaggatgacagctcgcccacctggagcaggcaaaactatggctactacagcagatacccaggcagaaacatcgactctgagaggccccgaggctaccatcatccccaaggattcttggaggacgatgactcgcccgtttgctatgattcacggagatctccaaggagacgcctactacctcccaccccagcatcccaccggagatcctccttcaactttgagtgcctgcgccggcagagcagccaggaagaggtcccgtcgtctcccatcttcccccatcgcacggccctgcctctgcatctaatgcagcaacagatcatggcagttgccggcctagattcaagtaaagcccagaagtactcaccgagtcactcgacccggtcgtgggccacccctccagcaacccctccctaccgggactggacaccgtgctacacccccctgatccaagtggagcagtcagaggccctggaccaggtgaacggcagcctgccgtccctgcaccgcagctcctggtacacagacgagcccgacatctcctaccggactttcacaccagccagcctgactgtccccagcagcttccggaacaaaaacagcgacaagcagaggagtgcggacagcttggtggaggcagtcctgatatccgaaggcttgggacgctatgcaagggacccaaaatttgtgtcagcaacaaaacacgaaatcgctgatgcctgtgacctcaccatcgacgagatggagagtgcagccagcaccctgcttaatgggaacgtgcgtccccgagccaacggggatgtgggccccctctcacaccggcaggactatgagctacaggactttggtcctggctacagcgacgaagagccagaccctgggagggatgaggaggacctggcggatgaaatgatatgcatcaccaccttgtagcccccagcgaggggcagactggctctggcctcaggtggggcgcaggagagccaggggaaaagtgcctcatagttaggaaagtttaggcactagttgggagtaatattcaattaattagacttttgtataagagatgtcatgcctcaagaaagccataaacctggtaggaacaggtcccaagcggttgagcctggcagagtaccatgcgctcggccccagctgcaggaaacagcaggccccgccctctcacagaggatgggtgaggaggccagacctgccctgccccattgtccagatgggcactgctgtggagtctgcttctcccatgtaccagggcaccaggcccacccaactgaaggcatggcggcggggtgcaggggaaagttaaaggtgatgacgatcatcacacctgtgtcgttacctcagccatcggtctagcatatcagtcactgggcccaacatatccatttttaaaccctttcccccaaatacactgcgtcctggttcctgtttagctgttctgaaatacggtgtgtaagtaagtcagaacccagctaccagtgattattgcgagggcaatgggacctcataaataaggttttctgtgatgtgacgccagtttacataagagaatatcactccgatggtcggtttctgactgtcacgctaagggcaactgtaaactggaataataatgcactcgcaaccaggtaaacttagatacactagtttgtttaaaattatagatttactgtacatgacttgtaatatactataatttgtatttgtaaagagatggtctatattttgtaattactgtattgtatttgaactgcagcaatatccatgggtcctaataattgtagttccccactaaaatctagaaattattagtatttttactcgggctatccagaagtagaagaaatagagccaattctcatttattcagcgaaaatcctctggggttaaaattttaagtttgaaagaacttgacactacagaaatttttctaaaatattttgagtcactataaacctatcatctttccacaagatataccagatgactatttgcagtcttttctttgggcaagagttccatgattttgatactgtacctttggatccaccatgggttgcaactgtctttggttttgtttgtttgacttgaaccaccctctgaagtaagtaagtgaattacagagcaggtccagctggctgctctgccccttgggtatccatagttacggttttctctgtggcccacccagggtgttttttgcatcgctggtgcagaaatgcataggtggatgagatatagctgctcttgtcctctggggactggtggtgctgcttaagaaataaggggtgctggggacagaggagcaacgtggtgatctataggattggagtgtcggggtctgtacaaatcgtattgttgccttttacaaaactgctgtactgtatgttctctttgagggcttttatatgcaattgaatgagggctgaagttttcattagaatgcactcacactctgactgtacgtcctgatgaaaacccacttttggataattagaaccgtcaaggcttcattttctgtcaacagaattaggccgactgtcaggttaccttggcagggattccctgcaatcaaaaagatagatgataggtagcaattttggtccaaaatttttaatagtatacagacaacctgttaatttttttttttttttttttttttgtaaataacaaacaccactttgttatgaagaccttacaaacctcttcttaagacattcttactctgatccaggcaaaaacacttcaaggtttgtaaatgactctttcctgacataaatccttttttattaaaatgcaaaatgttcttcagaataaaactgtgtaataatttttatacttgggagtgctccttgcacagagctgtcatttgccagtgagagcctccgacagggcaggtactgtgccagggcagctctgaaattatggatattcttatcctcctggttccttcggtgccaatggtaacctaataccagccgcagggagcgccatttctcctaaagggctacaccactgtcaacattatcctggactctgtgtctctctctgttgggtcttgtggcatcacatcaggccaaaattgccagaccaggaccctaagtgtctgatagaggcgatgatcttttccaaagtcagtacttacaaactggcattcttacaggctgcaccatttcctagtatgtctgctttaagcctggttcaacc

SEQ ID NO: 1215 - protein, 2154 aa, Homo sapiens
MMMMMMMKKMQHQRQQQADHANEANYRTRLPLSGEGPTSQPNSSKQTVLSWQAAIDAARQAKAAQTMSTSAPPPVGSLSQRKRQQYAKSKKQGNSSNSRPARALFCLSLNNPIRRACISIVEWKPFDIFILLAIFANCVAIYIPFPEDDSNSTNHNLEKVEYAFLIIFTVETFLKIIAYGLLLHPNAYVRNGWNLLDFVIVIVGLFSVIQLTKETEGGNHSSGKSGGFDVKALRAFRVLRPLRLVSGVPSLQVVLNSIIKAMVPLLHIALLVLFVIIIYAIIGLELFIGKMHKTCFFADSDIVAEEDPAPCAFSGNGRQCTANGTECRSGWVGPNGGITNFDNFAFAMLTVFQCITMEGWTDVLYWVNDAIGWEWPWVYFVSLIILGSFFVLNLVLGVLSGEFSKEREKAKRDFQKLREKQQLEEDLKGYLDWITQAEDIDPENEEEGGEEGKRNTSMPTSETESVNTENVSGEGENRGCCGSLWCWWRRRGAAKAGPSGCRRWGQAISKSKLSRRWRRWNRFNRRRCRAAVKSVTFYWLVIVLVFLNTLTISSEHYNQPDWLTQIQDIANKVLLALFTCEMLVKMYSLGLQAYFVSLFNRFDCFVVCGGITETILVELEIMSPLGISVFRCVRLLRIFKVTRHWTSLSNLVASLLNSMKSIASLLLLLFLFIIIFSLLGMQLFGGKFNFDETQTKRSTFDNFPQALLTVFQILTGEDWNAVMYDGIMAYGGPSSSGMIVCIYFIILFICGNYILLNVFLAIAVDNLADAESLNTAQKEEAEEKERKKIARKESLENKKNNKPEVNQIANSDNKVTIDDYREEDEDKDPYPPCDVPVGEEEEEEEEDEPEVPAGPRPRRISELNMKEKIAPIPEGSAFFILSKTNPIRVGCHKLINHHIFTNLILVFIMLSSAAAEDPIRSHSFRNTILGYFDYAFTAIFTVEILLKMTTFGAFLHKGAFCRNYFNLLDMLVVGVSLVSFGIQSSAISVVKILRVLRVLRPLRAINRAKGLKHVVQCVFVAIRTIGNIMIVTTLLQFMFACIGVQLFKGKFYRCTDEAKSNPEECRGLFILYKDGDVDSPVVRERIWQNSDFNFDNVLSAMMALFTVSTFEGWPALLYKAIDSNGENIGPIYNHRVEISIFFIIYIIIVAFFMMNIFVGFVIVTFQEQGEKEYKNCELDKNQRQCVEYALKARPLRRYIPKNPYQYKFWYVVNSSPFEYMMFVLIMLNTLCLAMQHYEQSKMFNDAMDILNMVFTGVFTVEMVLKVIAFKPKGYFSDAWNTFDSLIVIGSIIDVSEADPTESENVPVPTATPGNSEESNRISITFFRLFRVMRLVKLLSRGEGIRTLLWTFIKSFQALPYVLIAMLFFIYAVIGMQMFGKVAMRDNNQINRNNNFQTFPQAVLLLFRCATGEAWQEIMLACLPGKLCDPESDYNPGEEYTCGSNFAIVYFISFYMLCAFLIINLFVAVIMDNFDYLTRDWSILGPHHLDEFKRIWSEYDPEAKGRIKHLDVVTLLRRIQPPLGFGKLCPHRVACKRLVAMNMPLNSDGTVMFNATLFALVRTALKIKTEGNLEQANEELRAVIKKIWKKTSMKLLDQVVPPAGDDEVTVGKFYATFLIQDYFRKFKKRKEQGLVGKYPAKNTTIALQAGLRTLHDIGPEIRRAISCDLQDDEPEETKREEEDDVFKRNGALLGNHVNHVNSDRRDSLQQTNTTPLHVQRPSIPPASDTEKPLFPPAGNSVCHNHHNHNSIGKQVPTSTNANLNNANMSKAAHGKRPSIGNLEHVSENGHHSSHKHDREPQRRSSVKRSDSGDEQLPTICREDPEIHGYFRDPHCLGEQEYFSSEECYEDDSSPTWSRQNYGYYSRYPGRNIDSPRGYHHPQGFLEDDDSPVCYDSRRSPRRRLLPPTPASHRRSSFNFECLRRQSSQEEVPSSPIFPHRTALPLHLMQQQIMAVAGLDSSKAQKYSPSHSTRSWATPPATPPYRDWTPCYTPLIQVEQSEALDQVNGSLPSLHRSSWYTDEPDISYRTFTPASLTVPSSFRNKNSDKQRSADSLVEAVLISEGLGRYARDPKFVSATKHEIADACDLTIDEMESAASTLLNGNVRPRANGDVGPLSHRQDYELQDFGPGYSDEEPDPGRDEEDLADEMICITTL

SEQ ID NO: 1216 - DNA, 8866 bp, Homo sapiens
agaataagggcagggaccgcggctcctacctcttggtgatccccttccccattccgcccccgccccaacgcccagcacagtgccctgcacacagtagtcgctcaataaatgttcgtggatgatgatgatgatgatgatgaaaaaaatgcagcatcaacggcagcagcaagcggaccacgcgaacgaggcaaactatgcaagaggcaccagacttcctctttctggtgaaggaccaacttctcagccgaatagctccaagcaaactgtcctgtcttggcaagctgcaatcgatgctgctagacaggccaaggctgcccaaactatgagcacctctgcacccccacctgtaggatctctctcccaaagaaaacgtcagcaatacgccaagagcaaaaaacagggtaactcgtccaacagccgacctgcccgcgcccttttctgtttatcactcaataaccccatccgaagagcctgcattagtatagtggaatggaaaccatttgacatatttatattattggctatttttgccaattgtgtggccttagctatttacatcccattccctgaagatgattctaattcaacaaatcataacttggaaaaagtagaatatgccttcctgattatttttacagtcgagacatttttgaagattatagcgtatggattattgctacatcctaatgcttatgttaggaatggatggaatttactggattttgttatagtaatagtaggattgtttagtgtaattttggaacaattaaccaaagaaacagaaggcgggaaccactcaagcggcaaatctggaggctttgatgtcaaagccctccgtgcctttcgagtgttgcgaccacttcgactagtgtcaggagtgcccagtttacaagttgtcctgaactccattataaaagccatggttcccctccttcacatagcccttttggtattatttgtaatcataatctatgctattataggattggaactttttattggaaaaatgcacaaaacatgtttttttgctgactcagatatcgtagctgaagaggacccagctccatgtgcgttctcagggaatggacgccagtgtactgccaatggcacggaatgtaggagtggctgggttggcccgaacggaggcatcaccaactttgataactttgcctttgccatgcttactgtgtttcagtgcatcaccatggagggctggacagacgtgctctactgggtaaatgatgcgataggatgggaatggccatgggtgtattttgttagtctgatcatccttggctcatttttcgtccttaacctggttcttggtgtccttagtggagaattctcaaaggaaagagagaaggcaaaagcacggggagatttccagaagctccgggagaagcagcagctggaggaggatctaaagggctacttggattggatcacccaagctgaggacatcgatccggagaatgaggaagaaggaggagaggaaggcaaacgaaatactagcatgcccaccagcgagactgagtctgtgaacacagagaacgtcagcggtgaaggcgagaaccgaggctgctgtggaagtctctgtcaagccatctcaaaatccaaactcagccgacgctggcgtcgctggaaccgattcaatcgcagaagatgtagggccgccgtgaagtctgtcacgttttactggctggttatcgtcctggtgtttctgaacaccttaaccatttcctctgagcactacaatcagccagattggttgacacagattcaagatattgccaacaaagtcctcttggctctgttcacctgcgagatgctggtaaaaatgtacagcttgggcctccaagcatatttcgtctctcttttcaaccggtttgattgcttcgtggtgtgtggtggaatcactgagacgatcttggtggaactggaaatcatgtctcccctggggatctctgtgtttcggtgtgtgcgcctcttaagaatcttcaaagtgaccaggcactggacttccctgagcaacttagtggcatccttattaaactccatgaagtccatcgcttcgctgttgcttctgctttttctcttcattatcatcttttccttgcttgggatgcagctgtttggcggcaagtttaattttgatgaaacgcaaaccaagcggagcacctttgacaatttccctcaagcacttctcacagtgttccagatcctgacaggcgaagactggaatgctgtgatgtacgatggcatcatggcttacgggggcccatcctcttcaggaatgatcgtctgcatctacttcatcatcctcttcatttgtggtaactatattctactgaatgtcttcttggccatcgctgtagacaatttggctgatgctgaaagtctgaacactgctcagaaagaagaagcggaagaaaaggagaggaaaaagattgccagaaaagagagcctagaaaataaaaagaacaacaaaccagaagtcaaccagatagccaacagtgacaacaaggttacaattgatgactatagagaagaggatgaagacaaggacccctatccgccttgcgatgtgccagtaggggaagaggaagaggaagaggaggaggatgaacctgaggttcctgccggaccccgtcctcgaaggatctcggagttgaacatgaaggaaaaaattgcccccatccctgaagggagcgctttcttcattcttagcaagaccaacccgatccgcgtaggctgccacaagctcatcaaccaccacatcttcaccaacctcatccttgtcttcatcatgctgagcagcgctgccctggccgcagaggaccccatccgcagccactccttccggaacacgatactgggttactttgactatgccttcacagccatctttactgttgagatcctgttgaagatgacaacttttggagctttcctccacaaaggggccttctgcaggaactacttcaatttgctggatatgctggtggttggggtgtctctggtgtcatttgggattcaatccagtgccatctccgttgtgaagattctgagggtcttaagggtcctgcgtcccctcagggccatcaacagagcaaaaggacttaagcacgtggtccagtgcgtcttcgtggccatccggaccatcggcaacatcatgatcgtcaccaccctcctgcagttcatgtttgcctgtatcggggtccagttgttcaaggggaagttctatcgctgtacggatgaagccaaaagtaaccctgaagaatgcaggggacttttcatcctctacaaggatggggatgttgacagtcctgtggtccgtgaacggatctggcaaaacagtgatttcaacttcgacaacgtcctctctgctatgatggcgctcttcacagtctccacgtttgagggctggcctgcgttgctgtataaagccatcgactcgaatggagagaacatcggcccaatctacaaccaccgcgtggagatctccatcttcttcatcatctacatcatcattgtagctttcttcatgatgaacatctttgtgggctttgtcatcgttacatttcaggaacaaggagaaaaagagtataagaactgtgagctggacaaaaatcagcgtcagtgtgttgaatacgccttgaaagcacgtcccttgcggagatacatccccaaaaacccctaccagtacaagttctggtacgtggtgaactcttcgcctttcgaatacatgatgtttgtcctcatcatgctcaacacactctgcttggccatgcagcactacgagcagtccaagatgttcaatgatgccatggacattctgaacatggtcttcaccggggtgttcaccgtcgagatggttttgaaagtcatcgcatttaagcctaaggggtattttagtgacgcctggaacacgtttgactccctcatcgtaatcggcagcattatagacgtggccctcagcgaagcagacccaactgaaagtgaaaatgtccctgtcccaactgctacacctgggaactctgaagagagcaatagaatctccatcacctttttccgtcttttccgagtgatgcgattggtgaagcttctcagcaggggggaaggcatccggacattgctgtggacttttattaagtcctttcaggcgctcccgtatgtggccctcctcatagccatgctgttcttcatctatgcggtcattggcatgcagatgtttgggaaagttgccatgagagataacaaccagatcaataggaacaataacttccagacgtttccccaggcggtgctgctgctcttcaggtgtgcaacaggtgaggcctggcaggagatcatgctggcctgtctcccagggaagctctgtgaccctgagtcagattacaaccccggggaggagtatacatgtgggagcaactttgccattgtctatttcatcagtttttacatgctctgtgcatttctgatcatcaatctgtttgtggctgtcatcatggataatttcgactatctgacccgggactggtctattttggggcctcaccatttagatgaattcaaaagaatatggtcagaatatgaccctgaggcaaagggaaggataaaacaccttgatgtggtcactctgcttcgacgcatccagcctcccctggggtttgggaagttatgtccacacagggtagcgtgcaagagattagttgccatgaacatgcctctcaacagtgacgggacagtcatgtttaatgcaaccctgtttgctttggttcgaacggctcttaagatcaagaccgaagggaacctggagcaagctaatgaagaacttcgggctgtgataaagaaaatttggaagaaaaccagcatgaaattacttgaccaagttgtccctccagctggtgatgatgaggtaaccgtggggaagttctatgccactttcctgatacaggactactttaggaaattcaagaaacggaaagaacaaggactggtgggaaagtaccctgcgaagaacaccacaattgccctacaggcgggattaaggacactgcatgacattgggccagaaatccggcgtgctatatcgtgtgatttgcaagatgacgagcctgaggaaacaaaacgagaagaagaagatgatgtgttcaaaagaaatggtgccctgcttggaaaccatgtcaatcatgttaatagtgataggagagattcccttcagcagaccaataccacccaccgtcccctgcatgtccaaaggccttcaattccacctgcaagtgatactgagaaaccgctgtttcctccagcaggaaattcggtgtgtcataaccatcataaccataattccataggaaagcaagttcccacctcaacaaatgccaatctcaataatgccaatatgtccaaagctgcccatggaaagcggcccagcattgggaaccttgagcatgtgtctgaaaatgggcatcattcttcccacaagcatgaccgggagcctcagagaaggtccagtgtgaaaaggtccgactcaggagatgaacagctcccaactatttgccgggaagacccagagatacatggctatttcagggacccccactgcttgggggagcaggagtatttcagtagtgaggaatgctacgaggatgacagctcgcccacctggagcaggcaaaactatggctactacagcagatacccaggcagaaacatcgactctgagaggccccgaggctaccatcatccccaaggattcttggaggacgatgactcgcccgtttgctatgattcacggagatctccaaggagacgcctactacctcccaccccagcatcccaccggagatcctccttcaactttgagtgcctgcgccggcagagcagccaggaagaggtcccgtcgtctcccatcttcccccatcgcacggccctgcctctgcatctaatgcagcaacagatcatggcagttgccggcctagattcaagtaaagcccagaagtactcaccgagtcactcgacccggtcgtgggccacccctccagcaacccctccctaccgggactggacaccgtgctacacccccctgatccaagtggagcagtcagaggccctggaccaggtgaacggcagcctgccgtccctgcaccgcagctcctggtacacagacgagcccgacatctcctaccggactttcacaccagccagcctgactgtccccagcagcttccggaacaaaaacagcgacaagcagaggagtgcggacagcttggtggaggcagtcctgatatccgaaggcttgggacgctatgcaagggacccaaaatttgtgtcagcaacaaaacacgaaatcgctgatgcctgtgacctcaccatcgacgagatggagagtgcagccagcaccctgcttaatgggaacgtgcgtccccgagccaacggggatgtgggccccctctcacaccggcaggactatgagctacaggactttggtcctggctacagcgacgaagagccagaccctgggagggatgaggaggacctggcggatgaaatgatatgcatcaccaccttgtagcccccagcgaggggcagactggctctggcctcaggtggggcgcaggagagccaggggaaaagtgcctcatagttaggaaagtttaggcactagttgggagtaatattcaattaattagacttttgtataagagatgtcatgcctcaagaaagccataaacctggtaggaacaggtcccaagcggttgagcctggcagagtaccatgcgctcggccccagctgcaggaaacagcaggccccgccctctcacagaggatgggtgaggaggccagacctgccctgccccattgtccagatgggcactgctgtggagtctgcttctcccatgtaccagggcaccaggcccacccaactgaaggcatggcggcggggtgcaggggaaagttaaaggtgatgacgatcatcacacctgtgtcgttacctcagccatcggtctagcatatcagtcactgggcccaacatatccatttttaaaccctttcccccaaatacactgcgtcctggttcctgtttagctgttctgaaatacggtgtgtaagtaagtcagaacccagctaccagtgattattgcgagggcaatgggacctcataaataaggttttctgtgatgtgacgccagtttacataagagaatatcactccgatggtcggtttctgactgtcacgctaagggcaactgtaaactggaataataatgcactcgcaaccaggtaaacttagatacactagtttgtttaaaattatagatttactgtacatgacttgtaatatactataatttgtatttgtaaagagatggtctatattttgtaattactgtattgtatttgaactgcagcaatatccatgggtcctaataattgtagttccccactaaaatctagaaattattagtatttttactcgggctatccagaagtagaagaaatagagccaattctcatttattcagcgaaaatcctctggggttaaaattttaagtttgaaagaacttgacactacagaaatttttctaaaatattttgagtcactataaacctatcatctttccacaagatataccagatgactatttgcagtcttttctttgggcaagagttccatgattttgatactgtacctttggatccaccatgggttgcaactgtctttggttttgtttgtttgacttgaaccaccctctgaagtaagtaagtgaattacagagcaggtccagctggctgctctgccccttgggtatccatagttacggttttctctgtggcccacccagggtgttttttgcatcgctggtgcagaaatgcataggtggatgagatatagctgctcttgtcctctggggactggtggtgctgcttaagaaataaggggtgctggggacagaggagcaacgtggtgatctataggattggagtgtcggggtctgtacaaatcgtattgttgccttttacaaaactgctgtactgtatgttctctttgagggcttttatatgcaattgaatgagggctgaagttttcattagaatgcactcacactctgactgtacgtcctgatgaaaacccacttttggataattagaaccgtcaaggcttcattttctgtcaacagaattaggccgactgtcaggttaccttggcagggattccctgcaatcaaaaagatagatgataggtagcaattttggtccaaaatttttaatagtatacagacaacctgttaatttttttttttttttttttttttgtaaataacaaacaccactttgttatgaagaccttacaaacctcttcttaagacattcttactctgatccaggcaaaaacacttcaaggtttgtaaatgactctttcctgacataaatccttttttattaaaatgcaaaatgttcttcagaataaaactgtgtaataatttttatacttgggagtgctccttgcacagagctgtcatttgccagtgagagcctccgacagggcaggtactgtgccagggcagctctgaaattatggatattcttatcctcctggttccttcggtgccaatggtaacctaataccagccgcagggagcgccatttctcctaaagggctacaccactgtcaacattatcctggactctgtgtctctctctgttgggtcttgtggcatcacatcaggccaaaattgccagaccaggaccctaagtgtctgatagaggcgatgatcttttccaaagtcagtacttacaaactggcattcttacaggctgcaccatttcctagtatgtctgctttaagcctggttcaacc

SEQ ID NO: 1217 - protein, 2134 aa, Homo sapiens
MMMMMMMKKMQHQRQQQADHANEANYRTRLPLSGEGPTSQPNSSKQTVLSWQAAIDAARQAKAAQTMSTSAPPPVGSLSQRKRQQYAKSKKQGNSSNSRPARALFCLSLNNPIRRACISIVEWKPFDIFILLAIFANCVAIYIPFPEDDSNSTNHNLEKVEYAFLIIFTVETFLKIIAYGLLLHPNAYVRNGWNLLDFVIVIVGLFSVIQLTKETEGGNHSSGKSGGFDVKALRAFRVLRPLRLVSGVPSLQVVLNSIIKAMVPLLHIALLVLFVIIIYAIIGLELFIGKMHKTCFFADSDIVAEEDPAPCAFSGNGRQCTANGTECRSGWVGPNGGITNFDNFAFAMLTVFQCITMEGWTDVLYWVNDAIGWEWPWVYFVSLIILGSFFVLNLVLGVLSGEFSKEREKAKRDFQKLREKQQLEEDLKGYLDWITQAEDIDPENEEEGGEEGKRNTSMPTSETESVNTENVSGEGENRGCCGSLCQAISKSKLSRRWRRWNRFNRRRCRAAVKSVTFYWLVIVLVFLNTLTISSEHYNQPDWLTQIQDIANKVLLALFTCEMLVKMYSLGLQAYFVSLFNRFDCFVVCGGITETILVELEIMSPLGISVFRCVRLLRIFKVTRHWTSLSNLVASLLNSMKSIASLLLLLFLFIIIFSLLGMQLFGGKFNFDETQTKRSTFDNFPQALLTVFQILTGEDWNAVMYDGIMAYGGPSSSGMIVCIYFIILFICGNYILLNVFLAIAVDNLADAESLNTAQKEEAEEKERKKIARKESLENKKNNKPEVNQIANSDNKVTIDDYREEDEDKDPYPPCDVPVGEEEEEEEEDEPEVPAGPRPRRISELNMKEKIAPIPEGSAFFILSKTNPIRVGCHKLINHHIFTNLILVFIMLSSAAAEDPIRSHSFRNTILGYFDYAFTAIFTVEILLKMTTFGAFLHKGAFCRNYFNLLDMLVVGVSLVSFGIQSSAISVVKILRVLRVLRPLRAINRAKGLKHVVQCVFVAIRTIGNIMIVTTLLQFMFACIGVQLFKGKFYRCTDEAKSNPEECRGLFILYKDGDVDSPVVRERIWQNSDFNFDNVLSAMMALFTVSTFEGWPALLYKAIDSNGENIGPIYNHRVEISIFFIIYIIIVAFFMMNIFVGFVIVTFQEQGEKEYKNCELDKNQRQCVEYALKARPLRRYIPKNPYQYKFWYVVNSSPFEYMMFVLIMLNTLCLAMQHYEQSKMFNDAMDILNMVFTGVFTVEMVLKVIAFKPKGYFSDAWNTFDSLIVIGSIIDVSEADPTESENVPVPTATPGNSEESNRISITFFRLFRVMRLVKLLSRGEGIRTLLWTFIKSFQALPYVLIAMLFFIYAVIGMQMFGKVAMRDNNQINRNNNFQTFPQAVLLLFRCATGEAWQEIMLACLPGKLCDPESDYNPGEEYTCGSNFAIVYFISFYMLCAFLIINLFVAVIMDNFDYLTRDWSILGPHHLDEFKRIWSEYDPEAKGRIKHLDVVTLLRRIQPPLGFGKLCPHRVACKRLVAMNMPLNSDGTVMFNATLFALVRTALKIKTEGNLEQANEELRAVIKKIWKKTSMKLLDQVVPPAGDDEVTVGKFYATFLIQDYFRKFKKRKEQGLVGKYPAKNTTIALQAGLRTLHDIGPEIRRAISCDLQDDEPEETKREEEDDVFKRNGALLGNHVNHVNSDRRDSLQQTNTTPLHVQRPSIPPASDTEKPLFPPAGNSVCHNHHNHNSIGKQVPTSTNANLNNANMSKAAHGKRPSIGNLEHVSENGHHSSHKHDREPQRRSSVKRSDSGDEQLPTICREDPEIHGYFRDPHCLGEQEYFSSEECYEDDSSPTWSRQNYGYYSRYPGRNIDSPRGYHHPQGFLEDDDSPVCYDSRRSPRRRLLPPTPASHRRSSFNFECLRRQSSQEEVPSSPIFPHRTALPLHLMQQQIMAVAGLDSSKAQKYSPSHSTRSWATPPATPPYRDWTPCYTPLIQVEQSEALDQVNGSLPSLHRSSWYTDEPDISYRTFTPASLTVPSSFRNKNSDKQRSADSLVEAVLISEGLGRYARDPKFVSATKHEIADACDLTIDEMESAASTLLNGNVRPRANGDVGPLSHRQDYELQDFGPGYSDEEPDPGRDEEDLADEMICITTL

SEQ ID NO: 1218 - DNA, 8950 bp, Homo sapiens
agaataagggcagggaccgcggctcctacctcttggtgatccccttccccattccgcccccgccccaacgcccagcacagtgccctgcacacagtagtcgctcaataaatgttcgtggatgatgatgatgatgatgatgaaaaaaatgcagcatcaacggcagcagcaagcggaccacgcgaacgaggcaaactatgcaagaggcaccagacttcctctttctggtgaaggaccaacttctcagccgaatagctccaagcaaactgtcctgtcttggcaagctgcaatcgatgctgctagacaggccaaggctgcccaaactatgagcacctctgcacccccacctgtaggatctctctcccaaagaaaacgtcagcaatacgccaagagcaaaaaacagggtaactcgtccaacagccgacctgcccgcgcccttttctgtttatcactcaataaccccatccgaagagcctgcattagtatagtggaatggaaaccatttgacatatttatattattggctatttttgccaattgtgtggccttagctatttacatcccattccctgaagatgattctaattcaacaaatcataacttggaaaaagtagaatatgccttcctgattatttttacagtcgagacatttttgaagattatagcgtatggattattgctacatcctaatgcttatgttaggaatggatggaatttactggattttgttatagtaatagtaggattgtttagtgtaattttggaacaattaaccaaagaaacagaaggcgggaaccactcaagcggcaaatctggaggctttgatgtcaaagccctccgtgcctttcgagtgttgcgaccacttcgactagtgtcaggagtgcccagtttacaagttgtcctgaactccattataaaagccatggttcccctccttcacatagcccttttggtattatttgtaatcataatctatgctattataggattggaactttttattggaaaaatgcacaaaacatgtttttttgctgactcagatatcgtagctgaagaggacccagctccatgtgcgttctcagggaatggacgccagtgtactgccaatggcacggaatgtaggagtggctgggttggcccgaacggaggcatcaccaactttgataactttgcctttgccatgcttactgtgtttcagtgcatcaccatggagggctggacagacgtgctctactgggtaaatgatgcgataggatgggaatggccatgggtgtattttgttagtctgatcatccttggctcatttttcgtccttaacctggttcttggtgtccttagtggagaattctcaaaggaaagagagaaggcaaaagcacggggagatttccagaagctccgggagaagcagcagctggaggaggatctaaagggctacttggattggatcacccaagctgaggacatcgatccggagaatgaggaagaaggaggagaggaaggcaaacgaaatactagcatgcccaccagcgagactgagtctgtgaacacagagaacgtcagcggtgaaggcgagaaccgaggctgctgtggaagtctctggtgctggtggagacggagaggcgcggccaaggcggggccctctgggtgtcggcggtggggtcaagccatctcaaaatccaaactcagccgacgctggcgtcgctggaaccgattcaatcgcagaagatgtagggccgccgtgaagtctgtcacgttttactggctggttatcgtcctggtgtttctgaacaccttaaccatttcctctgagcactacaatcagccagattggttgacacagattcaagatattgccaacaaagtcctcttggctctgttcacctgcgagatgctggtaaaaatgtacagcttgggcctccaagcatatttcgtctctcttttcaaccggtttgattgcttcgtggtgtgtggtggaatcactgagacgatcttggtggaactggaaatcatgtctcccctggggatctctgtgtttcggtgtgtgcgcctcttaagaatcttcaaagtgaccaggcactggacttccctgagcaacttagtggcatccttattaaactccatgaagtccatcgcttcgctgttgcttctgctttttctcttcattatcatcttttccttgcttgggatgcagctgtttggcggcaagtttaattttgatgaaacgcaaaccaagcggagcacctttgacaatttccctcaagcacttctcacagtgttccagatcctgacaggcgaagactggaatgctgtgatgtacgatggcatcatggcttacgggggcccatcctcttcaggaatgatcgtctgcatctacttcatcatcctcttcatttgtggtaactatattctactgaatgtcttcttggccatcgctgtagacaatttggctgatgctgaaagtctgaacactgctcagaaagaagaagcggaagaaaaggagaggaaaaagattgccagaaaagagagcctagaaaataaaaagaacaacaaaccagaagtcaaccagatagccaacagtgacaacaaggttacaattgatgactatagagaagaggatgaagacaaggacccctatccgccttgcgatgtgccaggggaagaggaagaggaagaggaggaggatgaacctgaggttcctgccggaccccgtcctcgaaggatctcggagttgaacatgaaggaaaaaattgcccccatccctgaagggagcgctttcttcattcttagcaagaccaacccgatccgcgtaggctgccacaagctcatcaaccaccacatcttcaccaacctcatccttgtcttcatcatgctgagcagcgctgccctggccgcagaggaccccatccgcagccactccttccggaacacgatgctaggttacgcagactatgtcttcactggtacttttgcatttgagatcattttaaagatgacaacttttggagctttcctccacaaaggggccttctgcaggaactacttcaatttgctggatatgctggtggttggggtgtctctggtgtcatttgggattcaatccagtgccatctccgttgtgaagattctgagggtcttaagggtcctgcgtcccctcagggccatcaacagagcaaaaggacttaagcacgtggtccagtgcgtcttcgtggccatccggaccatcggcaacatcatgatcgtcaccaccctcctgcagttcatgtttgcctgtatcggggtccagttgttcaaggggaagttctatcgctgtacggatgaagccaaaagtaaccctgaagaatgcaggggacttttcatcctctacaaggatggggatgttgacagtcctgtggtccgtgaacggatctggcaaaacagtgatttcaacttcgacaacgtcctctctgctatgatggcgctcttcacagtctccacgtttgagggctggcctgcgttgctgtataaagccatcgactcgaatggagagaacatcggcccaatctacaaccaccgcgtggagatctccatcttcttcatcatctacatcatcattgtagctttcttcatgatgaacatctttgtgggctttgtcatcgttacatttcaggaacaaggagaaaaagagtataagaactgtgagctggacaaaaatcagcgtcagtgtgttgaatacgccttgaaagcacgtcccttgcggagatacatccccaaaaacccctaccagtacaagttctggtacgtggtgaactcttcgcctttcgaatacatgatgtttgtcctcatcatgctcaacacactctgcttggccatgcagcactacgagcagtccaagatgttcaatgatgccatggacattctgaacatggtcttcaccggggtgttcaccgtcgagatggttttgaaagtcatcgcatttaagcctaaggggtattttagtgacgcctggaacacgtttgactccctcatcgtaatcggcagcattatagacgtggccctcagcgaagcagacccaactgaaagtgaaaatgtccctgtcccaactgctacacctgggaactctgaagagagcaatagaatctccatcacctttttccgtcttttccgagtgatgcgattggtgaagcttctcagcaggggggaaggcatccggacattgctgtggacttttattaagtcctttcaggcgctcccgtatgtggccctcctcatagccatgctgttcttcatctatgcggtcattggcatgcagatgtttgggaaagttgccatgagagataacaaccagatcaataggaacaataacttccagacgtttccccaggcggtgctgctgctcttcaggtgtgcaacaggtgaggcctggcaggagatcatgctggcctgtctcccagggaagctctgtgaccctgagtcagattacaaccccggggaggagtatacatgtgggagcaactttgccattgtctatttcatcagtttttacatgctctgtgcatttctgatcatcaatctgtttgtggctgtcatcatggataatttcgactatctgacccgggactggtctattttggggcctcaccatttagatgaattcaaaagaatatggtcagaatatgaccctgaggcaaagggaaggataaaacaccttgatgtggtcactctgcttcgacgcatccagcctcccctggggtttgggaagttatgtccacacagggtagcgtgcaagagattagttgccatgaacatgcctctcaacagtgacgggacagtcatgtttaatgcaaccctgtttgctttggttcgaacggctcttaagatcaagaccgaagggaacctggagcaagctaatgaagaacttcgggctgtgataaagaaaatttggaagaaaaccagcatgaaattacttgaccaagttgtccctccagctggtgatgatgaggtaaccgtggggaagttctatgccactttcctgatacaggactactttaggaaattcaagaaacggaaagaacaaggactggtgggaaagtaccctgcgaagaacaccacaattgccctacaggcgggattaaggacactgcatgacattgggccagaaatccggcgtgctatatcgtgtgatttgcaagatgacgagcctgaggaaacaaaacgagaagaagaagatgatgtgttcaaaagaaatggtgccctgcttggaaaccatgtcaatcatgttaatagtgataggagagattcccttcagcagaccaataccacccaccgtcccctgcatgtccaaaggccttcaattccacctgcaagtgatactgagaaaccgctgtttcctccagcaggaaattcggtgtgtcataaccatcataaccataattccataggaaagcaagttcccacctcaacaaatgccaatctcaataatgccaatatgtccaaagctgcccatggaaagcggcccagcattgggaaccttgagcatgtgtctgaaaatgggcatcattcttcccacaagcatgaccgggagcctcagagaaggtccagtgtgaaaagaacccgctattatgaaacttacattaggtccgactcaggagatgaacagctcccaactatttgccgggaagacccagagatacatggctatttcagggacccccactgcttgggggagcaggagtatttcagtagtgaggaatgctacgaggatgacagctcgcccacctggagcaggcaaaactatggctactacagcagatacccaggcagaaacatcgactctgagaggccccgaggctaccatcatccccaaggattcttggaggacgatgactcgcccgtttgctatgattcacggagatctccaaggagacgcctactacctcccaccccagcatcccaccggagatcctccttcaactttgagtgcctgcgccggcagagcagccaggaagaggtcccgtcgtctcccatcttcccccatcgcacggccctgcctctgcatctaatgcagcaacagatcatggcagttgccggcctagattcaagtaaagcccagaagtactcaccgagtcactcgacccggtcgtgggccacccctccagcaacccctccctaccgggactggacaccgtgctacacccccctgatccaagtggagcagtcagaggccctggaccaggtgaacggcagcctgccgtccctgcaccgcagctcctggtacacagacgagcccgacatctcctaccggactttcacaccagccagcctgactgtccccagcagcttccggaacaaaaacagcgacaagcagaggagtgcggacagcttggtggaggcagtcctgatatccgaaggcttgggacgctatgcaagggacccaaaatttgtgtcagcaacaaaacacgaaatcgctgatgcctgtgacctcaccatcgacgagatggagagtgcagccagcaccctgcttaatgggaacgtgcgtccccgagccaacggggatgtgggccccctctcacaccggcaggactatgagctacaggactttggtcctggctacagcgacgaagagccagaccctgggagggatgaggaggacctggcggatgaaatgatatgcatcaccaccttgtagcccccagcgaggggcagactggctctggcctcaggtggggcgcaggagagccaggggaaaagtgcctcatagttaggaaagtttaggcactagttgggagtaatattcaattaattagacttttgtataagagatgtcatgcctcaagaaagccataaacctggtaggaacaggtcccaagcggttgagcctggcagagtaccatgcgctcggccccagctgcaggaaacagcaggccccgccctctcacagaggatgggtgaggaggccagacctgccctgccccattgtccagatgggcactgctgtggagtctgcttctcccatgtaccagggcaccaggcccacccaactgaaggcatggcggcggggtgcaggggaaagttaaaggtgatgacgatcatcacacctgtgtcgttacctcagccatcggtctagcatatcagtcactgggcccaacatatccatttttaaaccctttcccccaaatacactgcgtcctggttcctgtttagctgttctgaaatacggtgtgtaagtaagtcagaacccagctaccagtgattattgcgagggcaatgggacctcataaataaggttttctgtgatgtgacgccagtttacataagagaatatcactccgatggtcggtttctgactgtcacgctaagggcaactgtaaactggaataataatgcactcgcaaccaggtaaacttagatacactagtttgtttaaaattatagatttactgtacatgacttgtaatatactataatttgtatttgtaaagagatggtctatattttgtaattactgtattgtatttgaactgcagcaatatccatgggtcctaataattgtagttccccactaaaatctagaaattattagtatttttactcgggctatccagaagtagaagaaatagagccaattctcatttattcagcgaaaatcctctggggttaaaattttaagtttgaaagaacttgacactacagaaatttttctaaaatattttgagtcactataaacctatcatctttccacaagatataccagatgactatttgcagtcttttctttgggcaagagttccatgattttgatactgtacctttggatccaccatgggttgcaactgtctttggttttgtttgtttgacttgaaccaccctctgaagtaagtaagtgaattacagagcaggtccagctggctgctctgccccttgggtatccatagttacggttttctctgtggcccacccagggtgttttttgcatcgctggtgcagaaatgcataggtggatgagatatagctgctcttgtcctctggggactggtggtgctgcttaagaaataaggggtgctggggacagaggagcaacgtggtgatctataggattggagtgtcggggtctgtacaaatcgtattgttgccttttacaaaactgctgtactgtatgttctctttgagggcttttatatgcaattgaatgagggctgaagttttcattagaatgcactcacactctgactgtacgtcctgatgaaaacccacttttggataattagaaccgtcaaggcttcattttctgtcaacagaattaggccgactgtcaggttaccttggcagggattccctgcaatcaaaaagatagatgataggtagcaattttggtccaaaatttttaatagtatacagacaacctgttaatttttttttttttttttttttttgtaaataacaaacaccactttgttatgaagaccttacaaacctcttcttaagacattcttactctgatccaggcaaaaacacttcaaggtttgtaaatgactctttcctgacataaatccttttttattaaaatgcaaaatgttcttcagaataaaactgtgtaataatttttatacttgggagtgctccttgcacagagctgtcatttgccagtgagagcctccgacagggcaggtactgtgccagggcagctctgaaattatggatattcttatcctcctggttccttcggtgccaatggtaacctaataccagccgcagggagcgccatttctcctaaagggctacaccactgtcaacattatcctggactctgtgtctctctctgttgggtcttgtggcatcacatcaggccaaaattgccagaccaggaccctaagtgtctgatagaggcgatgatcttttccaaagtcagtacttacaaactggcattcttacaggctgcaccatttcctagtatgtctgctttaagcctggttcaacc

SEQ ID NO: 1219 - protein, 2162 aa, Homo sapiens
MMMMMMMKKMQHQRQQQADHANEANYRTRLPLSGEGPTSQPNSSKQTVLSWQAAIDAARQAKAAQTMSTSAPPPVGSLSQRKRQQYAKSKKQGNSSNSRPARALFCLSLNNPIRRACISIVEWKPFDIFILLAIFANCVAIYIPFPEDDSNSTNHNLEKVEYAFLIIFTVETFLKIIAYGLLLHPNAYVRNGWNLLDFVIVIVGLFSVIQLTKETEGGNHSSGKSGGFDVKALRAFRVLRPLRLVSGVPSLQVVLNSIIKAMVPLLHIALLVLFVIIIYAIIGLELFIGKMHKTCFFADSDIVAEEDPAPCAFSGNGRQCTANGTECRSGWVGPNGGITNFDNFAFAMLTVFQCITMEGWTDVLYWVNDAIGWEWPWVYFVSLIILGSFFVLNLVLGVLSGEFSKEREKAKRDFQKLREKQQLEEDLKGYLDWITQAEDIDPENEEEGGEEGKRNTSMPTSETESVNTENVSGEGENRGCCGSLWCWWRRRGAAKAGPSGCRRWGQAISKSKLSRRWRRWNRFNRRRCRAAVKSVTFYWLVIVLVFLNTLTISSEHYNQPDWLTQIQDIANKVLLALFTCEMLVKMYSLGLQAYFVSLFNRFDCFVVCGGITETILVELEIMSPLGISVFRCVRLLRIFKVTRHWTSLSNLVASLLNSMKSIASLLLLLFLFIIIFSLLGMQLFGGKFNFDETQTKRSTFDNFPQALLTVFQILTGEDWNAVMYDGIMAYGGPSSSGMIVCIYFIILFICGNYILLNVFLAIAVDNLADAESLNTAQKEEAEEKERKKIARKESLENKKNNKPEVNQIANSDNKVTIDDYREEDEDKDPYPPCDVPGEEEEEEEEDEPEVPAGPRPRRISELNMKEKIAPIPEGSAFFILSKTNPIRVGCHKLINHHIFTNLILVFIMLSSAAAEDPIRSHSFRNTMLGYADYVFTGTFAFEIILKMTTFGAFLHKGAFCRNYFNLLDMLVVGVSLVSFGIQSSAISVVKILRVLRVLRPLRAINRAKGLKHVVQCVFVAIRTIGNIMIVTTLLQFMFACIGVQLFKGKFYRCTDEAKSNPEECRGLFILYKDGDVDSPVVRERIWQNSDFNFDNVLSAMMALFTVSTFEGWPALLYKAIDSNGENIGPIYNHRVEISIFFIIYIIIVAFFMMNIFVGFVIVTFQEQGEKEYKNCELDKNQRQCVEYALKARPLRRYIPKNPYQYKFWYVVNSSPFEYMMFVLIMLNTLCLAMQHYEQSKMFNDAMDILNMVFTGVFTVEMVLKVIAFKPKGYFSDAWNTFDSLIVIGSIIDVSEADPTESENVPVPTATPGNSEESNRISITFFRLFRVMRLVKLLSRGEGIRTLLWTFIKSFQALPYVLIAMLFFIYAVIGMQMFGKVAMRDNNQINRNNNFQTFPQAVLLLFRCATGEAWQEIMLACLPGKLCDPESDYNPGEEYTCGSNFAIVYFISFYMLCAFLIINLFVAVIMDNFDYLTRDWSILGPHHLDEFKRIWSEYDPEAKGRIKHLDVVTLLRRIQPPLGFGKLCPHRVACKRLVAMNMPLNSDGTVMFNATLFALVRTALKIKTEGNLEQANEELRAVIKKIWKKTSMKLLDQVVPPAGDDEVTVGKFYATFLIQDYFRKFKKRKEQGLVGKYPAKNTTIALQAGLRTLHDIGPEIRRAISCDLQDDEPEETKREEEDDVFKRNGALLGNHVNHVNSDRRDSLQQTNTTPLHVQRPSIPPASDTEKPLFPPAGNSVCHNHHNHNSIGKQVPTSTNANLNNANMSKAAHGKRPSIGNLEHVSENGHHSSHKHDREPQRRSSVKRTRYYETYIRSDSGDEQLPTICREDPEIHGYFRDPHCLGEQEYFSSEECYEDDSSPTWSRQNYGYYSRYPGRNIDSPRGYHHPQGFLEDDDSPVCYDSRRSPRRRLLPPTPASHRRSSFNFECLRRQSSQEEVPSSPIFPHRTALPLHLMQQQIMAVAGLDSSKAQKYSPSHSTRSWATPPATPPYRDWTPCYTPLIQVEQSEALDQVNGSLPSLHRSSWYTDEPDISYRTFTPASLTVPSSFRNKNSDKQRSADSLVEAVLISEGLGRYARDPKFVSATKHEIADACDLTIDEMESAASTLLNGNVRPRANGDVGPLSHRQDYELQDFGPGYSDEEPDPGRDEEDLADEMICITTL

SEQ ID NO: 1220 - DNA, 8893 bp, Homo sapiens
agaataagggcagggaccgcggctcctacctcttggtgatccccttccccattccgcccccgccccaacgcccagcacagtgccctgcacacagtagtcgctcaataaatgttcgtggatgatgatgatgatgatgatgaaaaaaatgcagcatcaacggcagcagcaagcggaccacgcgaacgaggcaaactatgcaagaggcaccagacttcctctttctggtgaaggaccaacttctcagccgaatagctccaagcaaactgtcctgtcttggcaagctgcaatcgatgctgctagacaggccaaggctgcccaaactatgagcacctctgcacccccacctgtaggatctctctcccaaagaaaacgtcagcaatacgccaagagcaaaaaacagggtaactcgtccaacagccgacctgcccgcgcccttttctgtttatcactcaataaccccatccgaagagcctgcattagtatagtggaatggaaaccatttgacatatttatattattggctatttttgccaattgtgtggccttagctatttacatcccattccctgaagatgattctaattcaacaaatcataacttggaaaaagtagaatatgccttcctgattatttttacagtcgagacatttttgaagattatagcgtatggattattgctacatcctaatgcttatgttaggaatggatggaatttactggattttgttatagtaatagtaggattgtttagtgtaattttggaacaattaaccaaagaaacagaaggcgggaaccactcaagcggcaaatctggaggctttgatgtcaaagccctccgtgcctttcgagtgttgcgaccacttcgactagtgtcaggagtgcccagtttacaagttgtcctgaactccattataaaagccatggttcccctccttcacatagcccttttggtattatttgtaatcataatctatgctattataggattggaactttttattggaaaaatgcacaaaacatgtttttttgctgactcagatatcgtagctgaagaggacccagctccatgtgcgttctcagggaatggacgccagtgtactgccaatggcacggaatgtaggagtggctgggttggcccgaacggaggcatcaccaactttgataactttgcctttgccatgcttactgtgtttcagtgcatcaccatggagggctggacagacgtgctctactggatgaatgatgctatgggatttgaattgccctgggtgtattttgtcagtctcgtcatctttgggtcatttttcgtactaaatcttgtacttggtgtattgagcggagaattctcaaaggaaagagagaaggcaaaagcacggggagatttccagaagctccgggagaagcagcagctggaggaggatctaaagggctacttggattggatcacccaagctgaggacatcgatccggagaatgaggaagaaggaggagaggaaggcaaacgaaatactagcatgcccaccagcgagactgagtctgtgaacacagagaacgtcagcggtgaaggcgagaaccgaggctgctgtggaagtctctgtcaagccatctcaaaatccaaactcagccgacgctggcgtcgctggaaccgattcaatcgcagaagatgtagggccgccgtgaagtctgtcacgttttactggctggttatcgtcctggtgtttctgaacaccttaaccatttcctctgagcactacaatcagccagattggttgacacagattcaagatattgccaacaaagtcctcttggctctgttcacctgcgagatgctggtaaaaatgtacagcttgggcctccaagcatatttcgtctctcttttcaaccggtttgattgcttcgtggtgtgtggtggaatcactgagacgatcttggtggaactggaaatcatgtctcccctggggatctctgtgtttcggtgtgtgcgcctcttaagaatcttcaaagtgaccaggcactggacttccctgagcaacttagtggcatccttattaaactccatgaagtccatcgcttcgctgttgcttctgctttttctcttcattatcatcttttccttgcttgggatgcagctgtttggcggcaagtttaattttgatgaaacgcaaaccaagcggagcacctttgacaatttccctcaagcacttctcacagtgttccagatcctgacaggcgaagactggaatgctgtgatgtacgatggcatcatggcttacgggggcccatcctcttcaggaatgatcgtctgcatctacttcatcatcctcttcatttgtggtaactatattctactgaatgtcttcttggccatcgctgtagacaatttggctgatgctgaaagtctgaacactgctcagaaagaagaagcggaagaaaaggagaggaaaaagattgccagaaaagagagcctagaaaataaaaagaacaacaaaccagaagtcaaccagatagccaacagtgacaacaaggttacaattgatgactatagagaagaggatgaagacaaggacccctatccgccttgcgatgtgccagtaggggaagaggaagaggaagaggaggaggatgaacctgaggttcctgccggaccccgtcctcgaaggatctcggagttgaacatgaaggaaaaaattgcccccatccctgaagggagcgctttcttcattcttagcaagaccaacccgatccgcgtaggctgccacaagctcatcaaccaccacatcttcaccaacctcatccttgtcttcatcatgctgagcagcgctgccctggccgcagaggaccccatccgcagccactccttccggaacacgatactgggttactttgactatgccttcacagccatctttactgttgagatcctgttgaagatgacaacttttggagctttcctccacaaaggggccttctgcaggaactacttcaatttgctggatatgctggtggttggggtgtctctggtgtcatttgggattcaatccagtgccatctccgttgtgaagattctgagggtcttaagggtcctgcgtcccctcagggccatcaacagagcaaaaggacttaagcacgtggtccagtgcgtcttcgtggccatccggaccatcggcaacatcatgatcgtcaccaccctcctgcagttcatgtttgcctgtatcggggtccagttgttcaaggggaagttctatcgctgtacggatgaagccaaaagtaaccctgaagaatgcaggggacttttcatcctctacaaggatggggatgttgacagtcctgtggtccgtgaacggatctggcaaaacagtgatttcaacttcgacaacgtcctctctgctatgatggcgctcttcacagtctccacgtttgagggctggcctgcgttgctgtataaagccatcgactcgaatggagagaacatcggcccaatctacaaccaccgcgtggagatctccatcttcttcatcatctacatcatcattgtagctttcttcatgatgaacatctttgtgggctttgtcatcgttacatttcaggaacaaggagaaaaagagtataagaactgtgagctggacaaaaatcagcgtcagtgtgttgaatacgccttgaaagcacgtcccttgcggagatacatccccaaaaacccctaccagtacaagttctggtacgtggtgaactcttcgcctttcgaatacatgatgtttgtcctcatcatgctcaacacactctgcttggccatgcagcactacgagcagtccaagatgttcaatgatgccatggacattctgaacatggtcttcaccggggtgttcaccgtcgagatggttttgaaagtcatcgcatttaagcctaaggggtattttagtgacgcctggaacacgtttgactccctcatcgtaatcggcagcattatagacgtggccctcagcgaagcagacccaactgaaagtgaaaatgtccctgtcccaactgctacacctgggaactctgaagagagcaatagaatctccatcacctttttccgtcttttccgagtgatgcgattggtgaagcttctcagcaggggggaaggcatccggacattgctgtggacttttattaagtcctttcaggcgctcccgtatgtggccctcctcatagccatgctgttcttcatctatgcggtcattggcatgcagatgtttgggaaagttgccatgagagataacaaccagatcaataggaacaataacttccagacgtttccccaggcggtgctgctgctcttcaggtgtgcaacaggtgaggcctggcaggagatcatgctggcctgtctcccagggaagctctgtgaccctgagtcagattacaaccccggggaggagtatacatgtgggagcaactttgccattgtctatttcatcagtttttacatgctctgtgcatttctgatcatcaatctgtttgtggctgtcatcatggataatttcgactatctgacccgggactggtctattttggggcctcaccatttagatgaattcaaaagaatatggtcagaatatgaccctgaggcaaagggaaggataaaacaccttgatgtggtcactctgcttcgacgcatccagcctcccctggggtttgggaagttatgtccacacagggtagcgtgcaagagattagttgccatgaacatgcctctcaacagtgacgggacagtcatgtttaatgcaaccctgtttgctttggttcgaacggctcttaagatcaagaccgaagggaacctggagcaagctaatgaagaacttcgggctgtgataaagaaaatttggaagaaaaccagcatgaaattacttgaccaagttgtccctccagctggtgatgatgaggtaaccgtggggaagttctatgccactttcctgatacaggactactttaggaaattcaagaaacggaaagaacaaggactggtgggaaagtaccctgcgaagaacaccacaattgccctacaggcgggattaaggacactgcatgacattgggccagaaatccggcgtgctatatcgtgtgatttgcaagatgacgagcctgaggaaacaaaacgagaagaagaagatgatgtgttcaaaagaaatggtgccctgcttggaaaccatgtcaatcatgttaatagtgataggagagattcccttcagcagaccaataccacccaccgtcccctgcatgtccaaaggccttcaattccacctgcaagtgatactgagaaaccgctgtttcctccagcaggaaattcggtgtgtcataaccatcataaccataattccataggaaagcaagttcccacctcaacaaatgccaatctcaataatgccaatatgtccaaagctgcccatggaaagcggcccagcattgggaaccttgagcatgtgtctgaaaatgggcatcattcttcccacaagcatgaccgggagcctcagagaaggtccagtgtgaaaagaacccgctattatgaaacttacattaggtccgactcaggagatgaacagctcccaactatttgccgggaagacccagagatacatggctatttcagggacccccactgcttgggggagcaggagtatttcagtagtgaggaatgctacgaggatgacagctcgcccacctggagcaggcaaaactatggctactacagcagatacccaggcagaaacatcgactctgagaggccccgaggctaccatcatccccaaggattcttggaggacgatgactcgcccgtttgctatgattcacggagatctccaaggagacgcctactacctcccaccccagcatcccaccggagatcctccttcaactttgagtgcctgcgccggcagagcagccaggaagaggtcccgtcgtctcccatcttcccccatcgcacggccctgcctctgcatctaatgcagcaacagatcatggcagttgccggcctagattcaagtaaagcccagaagtactcaccgagtcactcgacccggtcgtgggccacccctccagcaacccctccctaccgggactggacaccgtgctacacccccctgatccaagtggagcagtcagaggccctggaccaggtgaacggcagcctgccgtccctgcaccgcagctcctggtacacagacgagcccgacatctcctaccggactttcacaccagccagcctgactgtccccagcagcttccggaacaaaaacagcgacaagcagaggagtgcggacagcttggtggaggcagtcctgatatccgaaggcttgggacgctatgcaagggacccaaaatttgtgtcagcaacaaaacacgaaatcgctgatgcctgtgacctcaccatcgacgagatggagagtgcagccagcaccctgcttaatgggaacgtgcgtccccgagccaacggggatgtgggccccctctcacaccggcaggactatgagctacaggactttggtcctggctacagcgacgaagagccagaccctgggagggatgaggaggacctggcggatgaaatgatatgcatcaccaccttgtagcccccagcgaggggcagactggctctggcctcaggtggggcgcaggagagccaggggaaaagtgcctcatagttaggaaagtttaggcactagttgggagtaatattcaattaattagacttttgtataagagatgtcatgcctcaagaaagccataaacctggtaggaacaggtcccaagcggttgagcctggcagagtaccatgcgctcggccccagctgcaggaaacagcaggccccgccctctcacagaggatgggtgaggaggccagacctgccctgccccattgtccagatgggcactgctgtggagtctgcttctcccatgtaccagggcaccaggcccacccaactgaaggcatggcggcggggtgcaggggaaagttaaaggtgatgacgatcatcacacctgtgtcgttacctcagccatcggtctagcatatcagtcactgggcccaacatatccatttttaaaccctttcccccaaatacactgcgtcctggttcctgtttagctgttctgaaatacggtgtgtaagtaagtcagaacccagctaccagtgattattgcgagggcaatgggacctcataaataaggttttctgtgatgtgacgccagtttacataagagaatatcactccgatggtcggtttctgactgtcacgctaagggcaactgtaaactggaataataatgcactcgcaaccaggtaaacttagatacactagtttgtttaaaattatagatttactgtacatgacttgtaatatactataatttgtatttgtaaagagatggtctatattttgtaattactgtattgtatttgaactgcagcaatatccatgggtcctaataattgtagttccccactaaaatctagaaattattagtatttttactcgggctatccagaagtagaagaaatagagccaattctcatttattcagcgaaaatcctctggggttaaaattttaagtttgaaagaacttgacactacagaaatttttctaaaatattttgagtcactataaacctatcatctttccacaagatataccagatgactatttgcagtcttttctttgggcaagagttccatgattttgatactgtacctttggatccaccatgggttgcaactgtctttggttttgtttgtttgacttgaaccaccctctgaagtaagtaagtgaattacagagcaggtccagctggctgctctgccccttgggtatccatagttacggttttctctgtggcccacccagggtgttttttgcatcgctggtgcagaaatgcataggtggatgagatatagctgctcttgtcctctggggactggtggtgctgcttaagaaataaggggtgctggggacagaggagcaacgtggtgatctataggattggagtgtcggggtctgtacaaatcgtattgttgccttttacaaaactgctgtactgtatgttctctttgagggcttttatatgcaattgaatgagggctgaagttttcattagaatgcactcacactctgactgtacgtcctgatgaaaacccacttttggataattagaaccgtcaaggcttcattttctgtcaacagaattaggccgactgtcaggttaccttggcagggattccctgcaatcaaaaagatagatgataggtagcaattttggtccaaaatttttaatagtatacagacaacctgttaatttttttttttttttttttttttgtaaataacaaacaccactttgttatgaagaccttacaaacctcttcttaagacattcttactctgatccaggcaaaaacacttcaaggtttgtaaatgactctttcctgacataaatccttttttattaaaatgcaaaatgttcttcagaataaaactgtgtaataatttttatacttgggagtgctccttgcacagagctgtcatttgccagtgagagcctccgacagggcaggtactgtgccagggcagctctgaaattatggatattcttatcctcctggttccttcggtgccaatggtaacctaataccagccgcagggagcgccatttctcctaaagggctacaccactgtcaacattatcctggactctgtgtctctctctgttgggtcttgtggcatcacatcaggccaaaattgccagaccaggaccctaagtgtctgatagaggcgatgatcttttccaaagtcagtacttacaaactggcattcttacaggctgcaccatttcctagtatgtctgctttaagcctggttcaacc

SEQ ID NO: 1221 - protein, 2143 aa, Homo sapiens
MMMMMMMKKMQHQRQQQADHANEANYRTRLPLSGEGPTSQPNSSKQTVLSWQAAIDAARQAKAAQTMSTSAPPPVGSLSQRKRQQYAKSKKQGNSSNSRPARALFCLSLNNPIRRACISIVEWKPFDIFILLAIFANCVAIYIPFPEDDSNSTNHNLEKVEYAFLIIFTVETFLKIIAYGLLLHPNAYVRNGWNLLDFVIVIVGLFSVIQLTKETEGGNHSSGKSGGFDVKALRAFRVLRPLRLVSGVPSLQVVLNSIIKAMVPLLHIALLVLFVIIIYAIIGLELFIGKMHKTCFFADSDIVAEEDPAPCAFSGNGRQCTANGTECRSGWVGPNGGITNFDNFAFAMLTVFQCITMEGWTDVLYWMNDAMGFELPWVYFVSLVIFGSFFVLNLVLGVLSGEFSKEREKAKRDFQKLREKQQLEEDLKGYLDWITQAEDIDPENEEEGGEEGKRNTSMPTSETESVNTENVSGEGENRGCCGSLCQAISKSKLSRRWRRWNRFNRRRCRAAVKSVTFYWLVIVLVFLNTLTISSEHYNQPDWLTQIQDIANKVLLALFTCEMLVKMYSLGLQAYFVSLFNRFDCFVVCGGITETILVELEIMSPLGISVFRCVRLLRIFKVTRHWTSLSNLVASLLNSMKSIASLLLLLFLFIIIFSLLGMQLFGGKFNFDETQTKRSTFDNFPQALLTVFQILTGEDWNAVMYDGIMAYGGPSSSGMIVCIYFIILFICGNYILLNVFLAIAVDNLADAESLNTAQKEEAEEKERKKIARKESLENKKNNKPEVNQIANSDNKVTIDDYREEDEDKDPYPPCDVPVGEEEEEEEEDEPEVPAGPRPRRISELNMKEKIAPIPEGSAFFILSKTNPIRVGCHKLINHHIFTNLILVFIMLSSAAAEDPIRSHSFRNTILGYFDYAFTAIFTVEILLKMTTFGAFLHKGAFCRNYFNLLDMLVVGVSLVSFGIQSSAISVVKILRVLRVLRPLRAINRAKGLKHVVQCVFVAIRTIGNIMIVTTLLQFMFACIGVQLFKGKFYRCTDEAKSNPEECRGLFILYKDGDVDSPVVRERIWQNSDFNFDNVLSAMMALFTVSTFEGWPALLYKAIDSNGENIGPIYNHRVEISIFFIIYIIIVAFFMMNIFVGFVIVTFQEQGEKEYKNCELDKNQRQCVEYALKARPLRRYIPKNPYQYKFWYVVNSSPFEYMMFVLIMLNTLCLAMQHYEQSKMFNDAMDILNMVFTGVFTVEMVLKVIAFKPKGYFSDAWNTFDSLIVIGSIIDVSEADPTESENVPVPTATPGNSEESNRISITFFRLFRVMRLVKLLSRGEGIRTLLWTFIKSFQALPYVLIAMLFFIYAVIGMQMFGKVAMRDNNQINRNNNFQTFPQAVLLLFRCATGEAWQEIMLACLPGKLCDPESDYNPGEEYTCGSNFAIVYFISFYMLCAFLIINLFVAVIMDNFDYLTRDWSILGPHHLDEFKRIWSEYDPEAKGRIKHLDVVTLLRRIQPPLGFGKLCPHRVACKRLVAMNMPLNSDGTVMFNATLFALVRTALKIKTEGNLEQANEELRAVIKKIWKKTSMKLLDQVVPPAGDDEVTVGKFYATFLIQDYFRKFKKRKEQGLVGKYPAKNTTIALQAGLRTLHDIGPEIRRAISCDLQDDEPEETKREEEDDVFKRNGALLGNHVNHVNSDRRDSLQQTNTTPLHVQRPSIPPASDTEKPLFPPAGNSVCHNHHNHNSIGKQVPTSTNANLNNANMSKAAHGKRPSIGNLEHVSENGHHSSHKHDREPQRRSSVKRTRYYETYIRSDSGDEQLPTICREDPEIHGYFRDPHCLGEQEYFSSEECYEDDSSPTWSRQNYGYYSRYPGRNIDSPRGYHHPQGFLEDDDSPVCYDSRRSPRRRLLPPTPASHRRSSFNFECLRRQSSQEEVPSSPIFPHRTALPLHLMQQQIMAVAGLDSSKAQKYSPSHSTRSWATPPATPPYRDWTPCYTPLIQVEQSEALDQVNGSLPSLHRSSWYTDEPDISYRTFTPASLTVPSSFRNKNSDKQRSADSLVEAVLISEGLGRYARDPKFVSATKHEIADACDLTIDEMESAASTLLNGNVRPRANGDVGPLSHRQDYELQDFGPGYSDEEPDPGRDEEDLADEMICITTL

SEQ ID NO: 1222 - DNA, 4921 bp, Homo sapiens
agaataagggcagggaccgcggctcctacctcttggtgatccccttccccattccgcccccgccccaacgcccagcacagtgccctgcacacagtagtcgctcaataaatgttcgtggatgatgatgatgatgatgatgaaaaaaatgcagcatcaacggcagcagcaagcggaccacgcgaacgaggcaaactatgcaagaggcaccagacttcctctttctggtgaaggaccaacttctcagccgaatagctccaagcaaactgtcctgtcttggcaagctgcaatcgatgctgctagacaggccaaggctgcccaaactatgagcacctctgcacccccacctgtaggatctctctcccaaagaaaacgtcagcaatacgccaagagcaaaaaacagggtaactcgtccaacagccgacctgcccgcgcccttttctgtttatcactcaataaccccatccgaagagcctgcattagtatagtggaatggaaaccatttgacatatttatattattggctatttttgccaattgtgtggccttagctatttacatcccattccctgaagatgattctaattcaacaaatcataacttggaaaaagtagaatatgccttcctgattatttttacagtcgagacatttttgaagattatagcgtatggattattgctacatcctaatgcttatgttaggaatggatggaatttactggattttgttatagtaatagtaggattgtttagtgtaattttggaacaattaaccaaagaaacagaaggcgggaaccactcaagcggcaaatctggaggctttgatgtcaaagccctccgtgcctttcgagtgttgcgaccacttcgactagtgtcaggagtgcccagtttacaagttgtcctgaactccattataaaagccatggttcccctccttcacatagcccttttggtattatttgtaatcataatctatgctattataggattggaactttttattggaaaaatgcacaaaacatgtttttttgctgactcagatatcgtagctgaagaggacccagctccatgtgcgttctcagggaatggacgccagtgtactgccaatggcacggaatgtaggagtggctgggttggcccgaacggaggcatcaccaactttgataactttgcctttgccatgcttactgtgtttcagtgcatcaccatggagggctggacagacgtgctctactggatgaatgatgctatgggatttgaattgccctgggtgtattttgtcagtctcgtcatctttgggtcatttttcgtactaaatcttgtacttggtgtattgagcggagaattctcaaaggaaagagagaaggcaaaagcacggggagatttccagaagctccgggagaagcagcagctggaggaggatctaaagggctacttggattggatcacccaagctgaggacatcgatccggagaatgaggaagaaggaggagaggaaggcaaacgaaatactagcatgcccaccagcgagactgagtctgtgaacacagagaacgtcagcggtgaaggcgagaaccgaggctgctgtggaagtctctgtcaagccatctcaaaatccaaactcagccgacgctggcgtcgctggaaccgattcaatcgcagaagatgtagggccgccgtgaagtctgtcacgttttactggctggttatcgtcctggtgtttctgaacaccttaaccatttcctctgagcactacaatcagccagattggttgacacagattcaagatattgccaacaaagtcctcttggctctgttcacctgcgagatgctggtaaaaatgtacagcttgggcctccaagcatatttcgtctctcttttcaaccggtttgattgcttcgtggtgtgtggtggaatcactgagacgatcttggtggaactggaaatcatgtctcccctggggatctctgtgtttcggtgtgtgcgcctcttaagaatcttcaaagtgaccaggcactggacttccctgagcaacttagtggcatccttattaaactccatgaagtccatcgcttcgctgttgcttctgctttttctcttcattatcatcttttccttgcttgggatgcagctgtttggcggcaagtttaattttgatgaaacgcaaaccaagcggagcacctttgacaatttccctcaagcacttctcacagtgttccagatcctgacaggcgaagactggaatgctgtgatgtacgatggcatcatggcttacgggggcccatcctcttcaggaatgatcgtctgcatctacttcatcatcctcttcatttgtggtaactatattctactgaatgtcttcttggccatcgctgtagacaatttggctgatgctgaaagtctgaacactgctcagaaagaagaagcggaagaaaaggagaggaaaaagattgccagaaaagagagcctagaaaataaaaagaacaacaaaccagaagtcaaccagatagccaacagtgacaacaaggttacaattgatgactatagagaagaggatgaagacaaggacccctatccgccttgcgatgtgccaggggaagaggaagaggaagaggaggaggatgaacctgaggttcctgccggaccccgtcctcgaaggatctcggagttgaacatgaaggaaaaaattgcccccatccctgaagggagcgctttcttcattcttagcaagaccaacccgatccgcgtaggctgccacaagctcatcaaccaccacatcttcaccaacctcatccttgtcttcatcatgctgagcagcgctgccctggccgcagaggaccccatccgcagccactccttccggaacacgatactgggttactttgactatgccttcacagccatctttactgttgagatcctgttgaagatgacaacttttggagctttcctccacaaaggggccttctgcaggaactacttcaatttgctggatatgctggtggttggggtgtctctggtgtcatttgggattcaatccagtgccatctccgttgtgaagattctgagggtcttaagggtcctgcgtcccctcagggccatcaacagagcaaaaggacttaagcacgtggtccagtgcgtcttcgtggccatccggaccatcggcaacatcatgatcgtcaccaccctcctgcagttcatgtttgcctgtatcggggtccagttgttcaaggggaagttctatcgctgtacggatgaagccaaaagtaaccctgaagaatgcaggggacttttcatcctctacaaggatggggatgttgacagtcctgtggtccgtgaacggatctggcaaaacagtgatttcaacttcgacaacgtcctctctgctatgatggcgctcttcacagtctccacgtttgagggctggcctgcgttgctgtataaagccatcgactcgaatggagagaacatcggcccaatctacaaccaccgcgtggagatctccatcttcttcatcatctacatcatcattgtagctttcttcatgatgaacatctttgtgggctttgtcatcgttacatttcaggaacaaggagaaaaagagtataagaactgtgagctggacaaaaatcagcgtcagtgtgttgaatacgccttgaaagcacgtcccttgcggagatacatccccaaaaacccctaccagtacaagttctggtacgtggtgaactcttcgcctttcgaatacatgatgtttgtcctcatcatgctcaacacactctgcttggccatgcagcactacgagcagtccaagatgttcaatgatgccatggacattctgaacatggtcttcaccggggtgttcaccgtcgagatggttttgaaagtcatcgcatttaagcctaaggggtattttagtgacgcctggaacacgtttgactccctcatcgtaatcggcagcattatagacgtggccctcagcgaagcagacccaactgaaagtgaaaatgtccctgtcccaactgctacacctgggaactctgaagagagcaatagaatctccatcacctttttccgtcttttccgagtgatgcgattggtgaagcttctcagcaggggggaaggcatccggacattgctgtggacttttattaagtcctttcaggcgctcccgtatgtggccctcctcatagccatgctgttcttcatctatgcggtcattggcatgcagatgtttgggaaagttgccatgagagataacaaccagatcaataggaacaataacttccagacgtttccccaggcggtgctgctgctcttcaggtgtgcaacaggtgaggcctggcaggagatcatgctggcctgtctcccagggaagctctgtgaccctgagtcagattacaaccccggggaggagtatacatgtgggagcaactttgccattgtctatttcatcagtttttacatgctctgtgcatttctgatcatcaatctgtttgtggctgtcatcatggataatttcgactatctgacccgggactggtctattttggggcctcaccatttagatgaattcaaaagaatatggtcagaatatgaccctgaggcaaagggaaggataaaacaccttgatgtggtcactctgcttcgacgcatccagcctcccctggggtttgggaagttatgtccacacagggtagcgtgcaagagattagttgccatgaacatgcctctcaacagtgacgggacagtcatgtttaatgcaaccctgtttgctttggttcgaacggctcttaagatcaagaccgaagggaacctggagcaagctaatgaagaacttcgggctgtgataaagaaaatttggaagaaaaccagcatgaaattacttgaccaagttgtccctccagctggtggtcagtgcagtcta

SEQ ID NO: 1223 - protein, 1587 aa, Homo sapiens
MMMMMMMKKMQHQRQQQADHANEANYRTRLPLSGEGPTSQPNSSKQTVLSWQAAIDAARQAKAAQTMSTSAPPPVGSLSQRKRQQYAKSKKQGNSSNSRPARALFCLSLNNPIRRACISIVEWKPFDIFILLAIFANCVAIYIPFPEDDSNSTNHNLEKVEYAFLIIFTVETFLKIIAYGLLLHPNAYVRNGWNLLDFVIVIVGLFSVIQLTKETEGGNHSSGKSGGFDVKALRAFRVLRPLRLVSGVPSLQVVLNSIIKAMVPLLHIALLVLFVIIIYAIIGLELFIGKMHKTCFFADSDIVAEEDPAPCAFSGNGRQCTANGTECRSGWVGPNGGITNFDNFAFAMLTVFQCITMEGWTDVLYWMNDAMGFELPWVYFVSLVIFGSFFVLNLVLGVLSGEFSKEREKAKRDFQKLREKQQLEEDLKGYLDWITQAEDIDPENEEEGGEEGKRNTSMPTSETESVNTENVSGEGENRGCCGSLCQAISKSKLSRRWRRWNRFNRRRCRAAVKSVTFYWLVIVLVFLNTLTISSEHYNQPDWLTQIQDIANKVLLALFTCEMLVKMYSLGLQAYFVSLFNRFDCFVVCGGITETILVELEIMSPLGISVFRCVRLLRIFKVTRHWTSLSNLVASLLNSMKSIASLLLLLFLFIIIFSLLGMQLFGGKFNFDETQTKRSTFDNFPQALLTVFQILTGEDWNAVMYDGIMAYGGPSSSGMIVCIYFIILFICGNYILLNVFLAIAVDNLADAESLNTAQKEEAEEKERKKIARKESLENKKNNKPEVNQIANSDNKVTIDDYREEDEDKDPYPPCDVPGEEEEEEEEDEPEVPAGPRPRRISELNMKEKIAPIPEGSAFFILSKTNPIRVGCHKLINHHIFTNLILVFIMLSSAAAEDPIRSHSFRNTILGYFDYAFTAIFTVEILLKMTTFGAFLHKGAFCRNYFNLLDMLVVGVSLVSFGIQSSAISVVKILRVLRVLRPLRAINRAKGLKHVVQCVFVAIRTIGNIMIVTTLLQFMFACIGVQLFKGKFYRCTDEAKSNPEECRGLFILYKDGDVDSPVVRERIWQNSDFNFDNVLSAMMALFTVSTFEGWPALLYKAIDSNGENIGPIYNHRVEISIFFIIYIIIVAFFMMNIFVGFVIVTFQEQGEKEYKNCELDKNQRQCVEYALKARPLRRYIPKNPYQYKFWYVVNSSPFEYMMFVLIMLNTLCLAMQHYEQSKMFNDAMDILNMVFTGVFTVEMVLKVIAFKPKGYFSDAWNTFDSLIVIGSIIDVSEADPTESENVPVPTATPGNSEESNRISITFFRLFRVMRLVKLLSRGEGIRTLLWTFIKSFQALPYVLIAMLFFIYAVIGMQMFGKVAMRDNNQINRNNNFQTFPQAVLLLFRCATGEAWQEIMLACLPGKLCDPESDYNPGEEYTCGSNFAIVYFISFYMLCAFLIINLFVAVIMDNFDYLTRDWSILGPHHLDEFKRIWSEYDPEAKGRIKHLDVVTLLRRIQPPLGFGKLCPHRVACKRLVAMNMPLNSDGTVMFNATLFALVRTALKIKTEGNLEQANEELRAVIKKIWKKTSMKLLDQVVPPAGGQCSL

SEQ ID NO: 1224 - DNA, 8668 bp, Homo sapiens
agaataagggcagggaccgcggctcctacctcttggtgatccccttccccattccgcccccgccccaacgcccagcacagtgccctgcacacagtagtcgctcaataaatgttcgtggatgatgatgatgatgatgatgaaaaaaatgcagcatcaacggcagcagcaagcggaccacgcgaacgaggcaaactatgcaagaggcaccagacttcctctttctggtgaaggaccaacttctcagccgaatagctccaagcaaactgtcctgtcttggcaagctgcaatcgatgctgctagacaggccaaggctgcccaaactatgagcacctctgcacccccacctgtaggatctctctcccaaagaaaacgtcagcaatacgccaagagcaaaaaacagggtaactcgtccaacagccgacctgcccgcgcccttttctgtttatcactcaataaccccatccgaagagcctgcattagtatagtggaatggaaaccatttgacatatttatattattggctatttttgccaattgtgtggccttagctatttacatcccattccctgaagatgattctaattcaacaaatcataacttggaaaaagtagaatatgccttcctgattatttttacagtcgagacatttttgaagattatagcgtatggattattgctacatcctaatgcttatgttaggaatggatggaatttactggattttgttatagtaatagtaggattgtttagtgtaattttggaacaattaaccaaagaaacagaaggcgggaaccactcaagcggcaaatctggaggctttgatgtcaaagccctccgtgcctttcgagtgttgcgaccacttcgactagtgtcaggagtgcccagtttacaagttgtcctgaactccattataaaagccatggttcccctccttcacatagcccttttggtattatttgtaatcataatctatgctattataggattggaactttttattggaaaaatgcacaaaacatgtttttttgctgactcagatatcgtagctgaagaggacccagctccatgtgcgttctcagggaatggacgccagtgtactgccaatggcacggaatgtaggagtggctgggttggcccgaacggaggcatcaccaactttgataactttgcctttgccatgcttactgtgtttcagtgcatcaccatggagggctggacagacgtgctctactgggtaaatgatgcgataggatgggaatggccatgggtgtattttgttagtctgatcatccttggctcatttttcgtccttaacctggttcttggtgtccttagtggagaattctcaaaggaaagagagaaggcaaaagcacggggagatttccagaagctccgggagaagcagcagctggaggaggatctaaagggctacttggattggatcacccaagctgaggacatcgatccggagaatgaggaagaaggaggagaggaaggcaaacgaaatactagcatgcccaccagcgagactgagtctgtgaacacagagaacgtcagcggtgaaggcgagaaccgaggctgctgtggaagtctctggtgctggtggagacggagaggcgcggccaaggcggggccctctgggtgtcggcggtggggtcaagccatctcaaaatccaaactcagccgacgctggcgtcgctggaaccgattcaatcgcagaagatgtagggccgccgtgaagtctgtcacgttttactggctggttatcgtcctggtgtttctgaacaccttaaccatttcctctgagcactacaatcagccagattggttgacacagattcaagatattgccaacaaagtcctcttggctctgttcacctgcgagatgctggtaaaaatgtacagcttgggcctccaagcatatttcgtctctcttttcaaccggtttgattgcttcgtggtgtgtggtggaatcactgagacgatcttggtggaactggaaatcatgtctcccctggggatctctgtgtttcggtgtgtgcgcctcttaagaatcttcaaagtgaccaggcactggacttccctgagcaacttagtggcatccttattaaactccatgaagtccatcgcttcgctgttgcttctgctttttctcttcattatcatcttttccttgcttgggatgcagctgtttggcggcaagtttaattttgatgaaacgcaaaccaagcggagcacctttgacaatttccctcaagcacttctcacagtgttccagatcctgacaggcgaagactggaatgctgtgatgtacgatggcatcatggcttacgggggcccatcctcttcaggaatgatcgtctgcatctacttcatcatcctcttcatttgtggtaactatattctactgaatgtcttcttggccatcgctgtagacaatttggctgatgctgaaagtctgaacactgctcagaaagaagaagcggaagaaaaggagaggaaaaagattgccagaaaagagagcctagaaaataaaaagaacaacaaaccagaagtcaaccagatagccaacagtgacaacaaggttacaattgatgactatagagaagaggatgaagacaaggacccctatccgccttgcgatgtgccagtaggggaagaggaagaggaagaggaggaggatgaacctgaggttcctgccggaccccgtcctcgaaggatctcggagttgaacatgaaggaaaaaattgcccccatccctgaagggagcgctttcttcattcttagcaagaccaacccgatccgcgtaggctgccacaagctcatcaaccaccacatcttcaccaacctcatccttgtcttcatcatgctgagcagcgctgccctggccgcagaggaccccatccgcagccactccttccggaacacgatactgggttactttgactatgccttcacagccatctttactgttgagatcctgttgaagatgacaacttttggagctttcctccacaaaggggccttctgcaggaactacttcaatttgctggatatgctggtggttggggtgtctctggtgtcatttgggattcaatccagtgccatctccgttgtgaagattctgagggtcttaagggtcctgcgtcccctcagggccatcaacagagcaaaaggacttaagcacgtggtccagtgcgtcttcgtggccatccggaccatcggcaacatcatgatcgtcaccaccctcctgcagttcatgtttgcctgtatcggggtccagttgttcaaggggaagttctatcgctgtacggatgaagccaaaagtaaccctgaagaatgcaggggacttttcatcctctacaaggatggggatgttgacagtcctgtggtccgtgaacggatctggcaaaacagtgatttcaacttcgacaacgtcctctctgctatgatggcgctcttcacagtctccacgtttgagggctggcctgcgttgctgtataaagccatcgactcgaatggagagaacatcggcccaatctacaaccaccgcgtggagatctccatcttcttcatcatctacatcatcattgtagctttcttcatgatgaacatctttgtgggctttgtcatcgttacatttcaggaacaaggagaaaaagagtataagaactgtgagctggacaaaaatcagcgtcagtgtgttgaatacgccttgaaagcacgtcccttgcggagatacatccccaaaaacccctaccagtacaagttctggtacgtggtgaactcttcgcctttcgaatacatgatgtttgtcctcatcatgctcaacacactctgcttggccatgcagcactacgagcagtccaagatgttcaatgatgccatggacattctgaacatggtcttcaccggggtgttcaccgtcgagatggttttgaaagtcatcgcatttaagcctaaggcgctcccgtatgtggccctcctcatagccatgctgttcttcatctatgcggtcattggcatgcagatgtttgggaaagttgccatgagagataacaaccagatcaataggaacaataacttccagacgtttccccaggcggtgctgctgctcttcaggtgtgcaacaggtgaggcctggcaggagatcatgctggcctgtctcccagggaagctctgtgaccctgagtcagattacaaccccggggaggagtatacatgtgggagcaactttgccattgtctatttcatcagtttttacatgctctgtgcatttctgatcatcaatctgtttgtggctgtcatcatggataatttcgactatctgacccgggactggtctattttggggcctcaccatttagatgaattcaaaagaatatggtcagaatatgaccctgaggcaaagggaaggataaaacaccttgatgtggtcactctgcttcgacgcatccagcctcccctggggtttgggaagttatgtccacacagggtagcgtgcaagagattagttgccatgaacatgcctctcaacagtgacgggacagtcatgtttaatgcaaccctgtttgctttggttcgaacggctcttaagatcaagaccgaagggaacctggagcaagctaatgaagaacttcgggctgtgataaagaaaatttggaagaaaaccagcatgaaattacttgaccaagttgtccctccagctggtgatgatgaggtaaccgtggggaagttctatgccactttcctgatacaggactactttaggaaattcaagaaacggaaagaacaaggactggtgggaaagtaccctgcgaagaacaccacaattgccctacaggcgggattaaggacactgcatgacattgggccagaaatccggcgtgctatatcgtgtgatttgcaagatgacgagcctgaggaaacaaaacgagaagaagaagatgatgtgttcaaaagaaatggtgccctgcttggaaaccatgtcaatcatgttaatagtgataggagagattcccttcagcagaccaataccacccaccgtcccctgcatgtccaaaggccttcaattccacctgcaagtgatactgagaaaccgctgtttcctccagcaggaaattcggtgtgtcataaccatcataaccataattccataggaaagcaagttcccacctcaacaaatgccaatctcaataatgccaatatgtccaaagctgcccatggaaagcggcccagcattgggaaccttgagcatgtgtctgaaaatgggcatcattcttcccacaagcatgaccgggagcctcagagaaggtccagtgtgaaaaggtccgactcaggagatgaacagctcccaactatttgccgggaagacccagagatacatggctatttcagggacccccactgcttgggggagcaggagtatttcagtagtgaggaatgctacgaggatgacagctcgcccacctggagcaggcaaaactatggctactacagcagatacccaggcagaaacatcgactctgagaggccccgaggctaccatcatccccaaggattcttggaggacgatgactcgcccgtttgctatgattcacggagatctccaaggagacgcctactacctcccaccccagcatcccaccggagatcctccttcaactttgagtgcctgcgccggcagagcagccaggaagaggtcccgtcgtctcccatcttcccccatcgcacggccctgcctctgcatctaatgcagcaacagatcatggcagttgccggcctagattcaagtaaagcccagaagtactcaccgagtcactcgacccggtcgtgggccacccctccagcaacccctccctaccgggactggacaccgtgctacacccccctgatccaagtggagcagtcagaggccctggaccaggtgaacggcagcctgccgtccctgcaccgcagctcctggtacacagacgagcccgacatctcctaccggactttcacaccagccagcctgactgtccccagcagcttccggaacaaaaacagcgacaagcagaggagtgcggacagcttggtggaggcagtcctgatatccgaaggcttgggacgctatgcaagggacccaaaatttgtgtcagcaacaaaacacgaaatcgctgatgcctgtgacctcaccatcgacgagatggagagtgcagccagcaccctgcttaatgggaacgtgcgtccccgagccaacggggatgtgggccccctctcacaccggcaggactatgagctacaggactttggtcctggctacagcgacgaagagccagaccctgggagggatgaggaggacctggcggatgaaatgatatgcatcaccaccttgtagcccccagcgaggggcagactggctctggcctcaggtggggcgcaggagagccaggggaaaagtgcctcatagttaggaaagtttaggcactagttgggagtaatattcaattaattagacttttgtataagagatgtcatgcctcaagaaagccataaacctggtaggaacaggtcccaagcggttgagcctggcagagtaccatgcgctcggccccagctgcaggaaacagcaggccccgccctctcacagaggatgggtgaggaggccagacctgccctgccccattgtccagatgggcactgctgtggagtctgcttctcccatgtaccagggcaccaggcccacccaactgaaggcatggcggcggggtgcaggggaaagttaaaggtgatgacgatcatcacacctgtgtcgttacctcagccatcggtctagcatatcagtcactgggcccaacatatccatttttaaaccctttcccccaaatacactgcgtcctggttcctgtttagctgttctgaaatacggtgtgtaagtaagtcagaacccagctaccagtgattattgcgagggcaatgggacctcataaataaggttttctgtgatgtgacgccagtttacataagagaatatcactccgatggtcggtttctgactgtcacgctaagggcaactgtaaactggaataataatgcactcgcaaccaggtaaacttagatacactagtttgtttaaaattatagatttactgtacatgacttgtaatatactataatttgtatttgtaaagagatggtctatattttgtaattactgtattgtatttgaactgcagcaatatccatgggtcctaataattgtagttccccactaaaatctagaaattattagtatttttactcgggctatccagaagtagaagaaatagagccaattctcatttattcagcgaaaatcctctggggttaaaattttaagtttgaaagaacttgacactacagaaatttttctaaaatattttgagtcactataaacctatcatctttccacaagatataccagatgactatttgcagtcttttctttgggcaagagttccatgattttgatactgtacctttggatccaccatgggttgcaactgtctttggttttgtttgtttgacttgaaccaccctctgaagtaagtaagtgaattacagagcaggtccagctggctgctctgccccttgggtatccatagttacggttttctctgtggcccacccagggtgttttttgcatcgctggtgcagaaatgcataggtggatgagatatagctgctcttgtcctctggggactggtggtgctgcttaagaaataaggggtgctggggacagaggagcaacgtggtgatctataggattggagtgtcggggtctgtacaaatcgtattgttgccttttacaaaactgctgtactgtatgttctctttgagggcttttatatgcaattgaatgagggctgaagttttcattagaatgcactcacactctgactgtacgtcctgatgaaaacccacttttggataattagaaccgtcaaggcttcattttctgtcaacagaattaggccgactgtcaggttaccttggcagggattccctgcaatcaaaaagatagatgataggtagcaattttggtccaaaatttttaatagtatacagacaacctgttaatttttttttttttttttttttttgtaaataacaaacaccactttgttatgaagaccttacaaacctcttcttaagacattcttactctgatccaggcaaaaacacttcaaggtttgtaaatgactctttcctgacataaatccttttttattaaaatgcaaaatgttcttcagaataaaactgtgtaataatttttatacttgggagtgctccttgcacagagctgtcatttgccagtgagagcctccgacagggcaggtactgtgccagggcagctctgaaattatggatattcttatcctcctggttccttcggtgccaatggtaacctaataccagccgcagggagcgccatttctcctaaagggctacaccactgtcaacattatcctggactctgtgtctctctctgttgggtcttgtggcatcacatcaggccaaaattgccagaccaggaccctaagtgtctgatagaggcgatgatcttttccaaagtcagtacttacaaactggcattcttacaggctgcaccatttcctagtatgtctgctttaagcctggttcaacc

SEQ ID NO: 1225 - protein, 2070 aa, Homo sapiens
MMMMMMMKKMQHQRQQQADHANEANYRTRLPLSGEGPTSQPNSSKQTVLSWQAAIDAARQAKAAQTMSTSAPPPVGSLSQRKRQQYAKSKKQGNSSNSRPARALFCLSLNNPIRRACISIVEWKPFDIFILLAIFANCVAIYIPFPEDDSNSTNHNLEKVEYAFLIIFTVETFLKIIAYGLLLHPNAYVRNGWNLLDFVIVIVGLFSVIQLTKETEGGNHSSGKSGGFDVKALRAFRVLRPLRLVSGVPSLQVVLNSIIKAMVPLLHIALLVLFVIIIYAIIGLELFIGKMHKTCFFADSDIVAEEDPAPCAFSGNGRQCTANGTECRSGWVGPNGGITNFDNFAFAMLTVFQCITMEGWTDVLYWVNDAIGWEWPWVYFVSLIILGSFFVLNLVLGVLSGEFSKEREKAKRDFQKLREKQQLEEDLKGYLDWITQAEDIDPENEEEGGEEGKRNTSMPTSETESVNTENVSGEGENRGCCGSLWCWWRRRGAAKAGPSGCRRWGQAISKSKLSRRWRRWNRFNRRRCRAAVKSVTFYWLVIVLVFLNTLTISSEHYNQPDWLTQIQDIANKVLLALFTCEMLVKMYSLGLQAYFVSLFNRFDCFVVCGGITETILVELEIMSPLGISVFRCVRLLRIFKVTRHWTSLSNLVASLLNSMKSIASLLLLLFLFIIIFSLLGMQLFGGKFNFDETQTKRSTFDNFPQALLTVFQILTGEDWNAVMYDGIMAYGGPSSSGMIVCIYFIILFICGNYILLNVFLAIAVDNLADAESLNTAQKEEAEEKERKKIARKESLENKKNNKPEVNQIANSDNKVTIDDYREEDEDKDPYPPCDVPVGEEEEEEEEDEPEVPAGPRPRRISELNMKEKIAPIPEGSAFFILSKTNPIRVGCHKLINHHIFTNLILVFIMLSSAAAEDPIRSHSFRNTILGYFDYAFTAIFTVEILLKMTTFGAFLHKGAFCRNYFNLLDMLVVGVSLVSFGIQSSAISVVKILRVLRVLRPLRAINRAKGLKHVVQCVFVAIRTIGNIMIVTTLLQFMFACIGVQLFKGKFYRCTDEAKSNPEECRGLFILYKDGDVDSPVVRERIWQNSDFNFDNVLSAMMALFTVSTFEGWPALLYKAIDSNGENIGPIYNHRVEISIFFIIYIIIVAFFMMNIFVGFVIVTFQEQGEKEYKNCELDKNQRQCVEYALKARPLRRYIPKNPYQYKFWYVVNSSPFEYMMFVLIMLNTLCLAMQHYEQSKMFNDAMDILNMVFTGVFTVEMVLKVIAFKPKALPYVLIAMLFFIYAVIGMQMFGKVAMRDNNQINRNNNFQTFPQAVLLLFRCATGEAWQEIMLACLPGKLCDPESDYNPGEEYTCGSNFAIVYFISFYMLCAFLIINLFVAVIMDNFDYLTRDWSILGPHHLDEFKRIWSEYDPEAKGRIKHLDVVTLLRRIQPPLGFGKLCPHRVACKRLVAMNMPLNSDGTVMFNATLFALVRTALKIKTEGNLEQANEELRAVIKKIWKKTSMKLLDQVVPPAGDDEVTVGKFYATFLIQDYFRKFKKRKEQGLVGKYPAKNTTIALQAGLRTLHDIGPEIRRAISCDLQDDEPEETKREEEDDVFKRNGALLGNHVNHVNSDRRDSLQQTNTTPLHVQRPSIPPASDTEKPLFPPAGNSVCHNHHNHNSIGKQVPTSTNANLNNANMSKAAHGKRPSIGNLEHVSENGHHSSHKHDREPQRRSSVKRSDSGDEQLPTICREDPEIHGYFRDPHCLGEQEYFSSEECYEDDSSPTWSRQNYGYYSRYPGRNIDSPRGYHHPQGFLEDDDSPVCYDSRRSPRRRLLPPTPASHRRSSFNFECLRRQSSQEEVPSSPIFPHRTALPLHLMQQQIMAVAGLDSSKAQKYSPSHSTRSWATPPATPPYRDWTPCYTPLIQVEQSEALDQVNGSLPSLHRSSWYTDEPDISYRTFTPASLTVPSSFRNKNSDKQRSADSLVEAVLISEGLGRYARDPKFVSATKHEIADACDLTIDEMESAASTLLNGNVRPRANGDVGPLSHRQDYELQDFGPGYSDEEPDPGRDEEDLADEMICITTL

SEQ ID NO: 1226 - DNA, 8908 bp, Homo sapiens
agaataagggcagggaccgcggctcctacctcttggtgatccccttccccattccgcccccgccccaacgcccagcacagtgccctgcacacagtagtcgctcaataaatgttcgtggatgatgatgatgatgatgatgaaaaaaatgcagcatcaacggcagcagcaagcggaccacgcgaacgaggcaaactatgcaagaggcaccagacttcctctttctggtgaaggaccaacttctcagccgaatagctccaagcaaactgtcctgtcttggcaagctgcaatcgatgctgctagacaggccaaggctgcccaaactatgagcacctctgcacccccacctgtaggatctctctcccaaagaaaacgtcagcaatacgccaagagcaaaaaacagggtaactcgtccaacagccgacctgcccgcgcccttttctgtttatcactcaataaccccatccgaagagcctgcattagtatagtggaatggaaaccatttgacatatttatattattggctatttttgccaattgtgtggccttagctatttacatcccattccctgaagatgattctaattcaacaaatcataacttggaaaaagtagaatatgccttcctgattatttttacagtcgagacatttttgaagattatagcgtatggattattgctacatcctaatgcttatgttaggaatggatggaatttactggattttgttatagtaatagtaggattgtttagtgtaattttggaacaattaaccaaagaaacagaaggcgggaaccactcaagcggcaaatctggaggctttgatgtcaaagccctccgtgcctttcgagtgttgcgaccacttcgactagtgtcaggagtgcccagtttacaagttgtcctgaactccattataaaagccatggttcccctccttcacatagcccttttggtattatttgtaatcataatctatgctattataggattggaactttttattggaaaaatgcacaaaacatgtttttttgctgactcagatatcgtagctgaagaggacccagctccatgtgcgttctcagggaatggacgccagtgtactgccaatggcacggaatgtaggagtggctgggttggcccgaacggaggcatcaccaactttgataactttgcctttgccatgcttactgtgtttcagtgcatcaccatggagggctggacagacgtgctctactgggtaaatgatgcgataggatgggaatggccatgggtgtattttgttagtctgatcatccttggctcatttttcgtccttaacctggttcttggtgtccttagtggagaattctcaaaggaaagagagaaggcaaaagcacggggagatttccagaagctccgggagaagcagcagctggaggaggatctaaagggctacttggattggatcacccaagctgaggacatcgatccggagaatgaggaagaaggaggagaggaaggcaaacgaaatactagcatgcccaccagcgagactgagtctgtgaacacagagaacgtcagcggtgaaggcgagaaccgaggctgctgtggaagtctctggtgctggtggagacggagaggcgcggccaaggcggggccctctgggtgtcggcggtggggtcaagccatctcaaaatccaaactcagccgacgctggcgtcgctggaaccgattcaatcgcagaagatgtagggccgccgtgaagtctgtcacgttttactggctggttatcgtcctggtgtttctgaacaccttaaccatttcctctgagcactacaatcagccagattggttgacacagattcaagatattgccaacaaagtcctcttggctctgttcacctgcgagatgctggtaaaaatgtacagcttgggcctccaagcatatttcgtctctcttttcaaccggtttgattgcttcgtggtgtgtggtggaatcactgagacgatcttggtggaactggaaatcatgtctcccctggggatctctgtgtttcggtgtgtgcgcctcttaagaatcttcaaagtgaccaggcactggacttccctgagcaacttagtggcatccttattaaactccatgaagtccatcgcttcgctgttgcttctgctttttctcttcattatcatcttttccttgcttgggatgcagctgtttggcggcaagtttaattttgatgaaacgcaaaccaagcggagcacctttgacaatttccctcaagcacttctcacagtgttccagatcctgacaggcgaagactggaatgctgtgatgtacgatggcatcatggcttacgggggcccatcctcttcaggaatgatcgtctgcatctacttcatcatcctcttcatttgtggtaactatattctactgaatgtcttcttggccatcgctgtagacaatttggctgatgctgaaagtctgaacactgctcagaaagaagaagcggaagaaaaggagaggaaaaagattgccagaaaagagagcctagaaaataaaaagaacaacaaaccagaagtcaaccagatagccaacagtgacaacaaggttacaattgatgactatagagaagaggatgaagacaaggacccctatccgccttgcgatgtgccagtaggggaagaggaagaggaagaggaggaggatgaacctgaggttcctgccggaccccgtcctcgaaggatctcggagttgaacatgaaggaaaaaattgcccccatccctgaagggagcgctttcttcattcttagcaagaccaacccgatccgcgtaggctgccacaagctcatcaaccaccacatcttcaccaacctcatccttgtcttcatcatgctgagcagcgctgccctggccgcagaggaccccatccgcagccactccttccggaacacgatactgggttactttgactatgccttcacagccatctttactgttgagatcctgttgaagatgacaacttttggagctttcctccacaaaggggccttctgcaggaactacttcaatttgctggatatgctggtggttggggtgtctctggtgtcatttgggattcaatccagtgccatctccgttgtgaagattctgagggtcttaagggtcctgcgtcccctcagggccatcaacagagcaaaaggacttaagcacgtggtccagtgcgtcttcgtggccatccggaccatcggcaacatcatgatcgtcaccaccctcctgcagttcatgtttgcctgtatcggggtccagttgttcaaggggaagttctatcgctgtacggatgaagccaaaagtaaccctgaagaatgcaggggacttttcatcctctacaaggatggggatgttgacagtcctgtggtccgtgaacggatctggcaaaacagtgatttcaacttcgacaacgtcctctctgctatgatggcgctcttcacagtctccacgtttgagggctggcctgcgttgctgtataaagccatcgactcgaatggagagaacatcggcccaatctacaaccaccgcgtggagatctccatcttcttcatcatctacatcatcattgtagctttcttcatgatgaacatctttgtgggctttgtcatcgttacatttcaggaacaaggagaaaaagagtataagaactgtgagctggacaaaaatcagcgtcagtgtgttgaatacgccttgaaagcacgtcccttgcggagatacatccccaaaaacccctaccagtacaagttctggtacgtggtgaactcttcgcctttcgaatacatgatgtttgtcctcatcatgctcaacacactctgcttggccatgcagcactacgagcagtccaagatgttcaatgatgccatggacattctgaacatggtcttcaccggggtgttcaccgtcgagatggttttgaaagtcatcgcatttaagcctaagcactatttcactgatgcatggaacacttttgatgccttaattgttgttggtagcgtcgttgatattgctataactgaagtgaataactctgaagagagcaatagaatctccatcacctttttccgtcttttccgagtgatgcgattggtgaagcttctcagcaggggggaaggcatccggacattgctgtggacttttattaagtcctttcaggcgctcccgtatgtggccctcctcatagccatgctgttcttcatctatgcggtcattggcatgcagatgtttgggaaagttgccatgagagataacaaccagatcaataggaacaataacttccagacgtttccccaggcggtgctgctgctcttcaggtgtgcaacaggtgaggcctggcaggagatcatgctggcctgtctcccagggaagctctgtgaccctgagtcagattacaaccccggggaggagtatacatgtgggagcaactttgccattgtctatttcatcagtttttacatgctctgtgcatttctgatcatcaatctgtttgtggctgtcatcatggataatttcgactatctgacccgggactggtctattttggggcctcaccatttagatgaattcaaaagaatatggtcagaatatgaccctgaggcaaagggaaggataaaacaccttgatgtggtcactctgcttcgacgcatccagcctcccctggggtttgggaagttatgtccacacagggtagcgtgcaagagattagttgccatgaacatgcctctcaacagtgacgggacagtcatgtttaatgcaaccctgtttgctttggttcgaacggctcttaagatcaagaccgaagggaacctggagcaagctaatgaagaacttcgggctgtgataaagaaaatttggaagaaaaccagcatgaaattacttgaccaagttgtccctccagctggtgatgatgaggtaaccgtggggaagttctatgccactttcctgatacaggactactttaggaaattcaagaaacggaaagaacaaggactggtgggaaagtaccctgcgaagaacaccacaattgccctacaggcgggattaaggacactgcatgacattgggccagaaatccggcgtgctatatcgtgtgatttgcaagatgacgagcctgaggaaacaaaacgagaagaagaagatgatgtgttcaaaagaaatggtgccctgcttggaaaccatgtcaatcatgttaatagtgataggagagattcccttcagcagaccaataccacccaccgtcccctgcatgtccaaaggccttcaattccacctgcaagtgatactgagaaaccgctgtttcctccagcaggaaattcggtgtgtcataaccatcataaccataattccataggaaagcaagttcccacctcaacaaatgccaatctcaataatgccaatatgtccaaagctgcccatggaaagcggcccagcattgggaaccttgagcatgtgtctgaaaatgggcatcattcttcccacaagcatgaccgggagcctcagagaaggtccagtgtgaaaagaacccgctattatgaaacttacattaggtccgactcaggagatgaacagctcccaactatttgccgggaagacccagagatacatggctatttcagggacccccactgcttgggggagcaggagtatttcagtagtgaggaatgctacgaggatgacagctcgcccacctggagcaggcaaaactatggctactacagcagatacccaggcagaaacatcgactctgagaggccccgaggctaccatcatccccaaggattcttggaggacgatgactcgcccgtttgctatgattcacggagatctccaaggagacgcctactacctcccaccccagcatcccaccggagatcctccttcaactttgagtgcctgcgccggcagagcagccaggaagaggtcccgtcgtctcccatcttcccccatcgcacggccctgcctctgcatctaatgcagcaacagatcatggcagttgccggcctagattcaagtaaagcccagaagtactcaccgagtcactcgacccggtcgtgggccacccctccagcaacccctccctaccgggactggacaccgtgctacacccccctgatccaagtggagcagtcagaggccctggaccaggtgaacggcagcctgccgtccctgcaccgcagctcctggtacacagacgagcccgacatctcctaccggactttcacaccagccagcctgactgtccccagcagcttccggaacaaaaacagcgacaagcagaggagtgcggacagcttggtggaggcagtcctgatatccgaaggcttgggacgctatgcaagggacccaaaatttgtgtcagcaacaaaacacgaaatcgctgatgcctgtgacctcaccatcgacgagatggagagtgcagccagcaccctgcttaatgggaacgtgcgtccccgagccaacggggatgtgggccccctctcacaccggcaggactatgagctacaggactttggtcctggctacagcgacgaagagccagaccctgggagggatgaggaggacctggcggatgaaatgatatgcatcaccaccttgtagcccccagcgaggggcagactggctctggcctcaggtggggcgcaggagagccaggggaaaagtgcctcatagttaggaaagtttaggcactagttgggagtaatattcaattaattagacttttgtataagagatgtcatgcctcaagaaagccataaacctggtaggaacaggtcccaagcggttgagcctggcagagtaccatgcgctcggccccagctgcaggaaacagcaggccccgccctctcacagaggatgggtgaggaggccagacctgccctgccccattgtccagatgggcactgctgtggagtctgcttctcccatgtaccagggcaccaggcccacccaactgaaggcatggcggcggggtgcaggggaaagttaaaggtgatgacgatcatcacacctgtgtcgttacctcagccatcggtctagcatatcagtcactgggcccaacatatccatttttaaaccctttcccccaaatacactgcgtcctggttcctgtttagctgttctgaaatacggtgtgtaagtaagtcagaacccagctaccagtgattattgcgagggcaatgggacctcataaataaggttttctgtgatgtgacgccagtttacataagagaatatcactccgatggtcggtttctgactgtcacgctaagggcaactgtaaactggaataataatgcactcgcaaccaggtaaacttagatacactagtttgtttaaaattatagatttactgtacatgacttgtaatatactataatttgtatttgtaaagagatggtctatattttgtaattactgtattgtatttgaactgcagcaatatccatgggtcctaataattgtagttccccactaaaatctagaaattattagtatttttactcgggctatccagaagtagaagaaatagagccaattctcatttattcagcgaaaatcctctggggttaaaattttaagtttgaaagaacttgacactacagaaatttttctaaaatattttgagtcactataaacctatcatctttccacaagatataccagatgactatttgcagtcttttctttgggcaagagttccatgattttgatactgtacctttggatccaccatgggttgcaactgtctttggttttgtttgtttgacttgaaccaccctctgaagtaagtaagtgaattacagagcaggtccagctggctgctctgccccttgggtatccatagttacggttttctctgtggcccacccagggtgttttttgcatcgctggtgcagaaatgcataggtggatgagatatagctgctcttgtcctctggggactggtggtgctgcttaagaaataaggggtgctggggacagaggagcaacgtggtgatctataggattggagtgtcggggtctgtacaaatcgtattgttgccttttacaaaactgctgtactgtatgttctctttgagggcttttatatgcaattgaatgagggctgaagttttcattagaatgcactcacactctgactgtacgtcctgatgaaaacccacttttggataattagaaccgtcaaggcttcattttctgtcaacagaattaggccgactgtcaggttaccttggcagggattccctgcaatcaaaaagatagatgataggtagcaattttggtccaaaatttttaatagtatacagacaacctgttaatttttttttttttttttttttttgtaaataacaaacaccactttgttatgaagaccttacaaacctcttcttaagacattcttactctgatccaggcaaaaacacttcaaggtttgtaaatgactctttcctgacataaatccttttttattaaaatgcaaaatgttcttcagaataaaactgtgtaataatttttatacttgggagtgctccttgcacagagctgtcatttgccagtgagagcctccgacagggcaggtactgtgccagggcagctctgaaattatggatattcttatcctcctggttccttcggtgccaatggtaacctaataccagccgcagggagcgccatttctcctaaagggctacaccactgtcaacattatcctggactctgtgtctctctctgttgggtcttgtggcatcacatcaggccaaaattgccagaccaggaccctaagtgtctgatagaggcgatgatcttttccaaagtcagtacttacaaactggcattcttacaggctgcaccatttcctagtatgtctgctttaagcctggttcaacc

SEQ ID NO: 1227 - protein, 2150 aa, Homo sapiens
MMMMMMMKKMQHQRQQQADHANEANYRTRLPLSGEGPTSQPNSSKQTVLSWQAAIDAARQAKAAQTMSTSAPPPVGSLSQRKRQQYAKSKKQGNSSNSRPARALFCLSLNNPIRRACISIVEWKPFDIFILLAIFANCVAIYIPFPEDDSNSTNHNLEKVEYAFLIIFTVETFLKIIAYGLLLHPNAYVRNGWNLLDFVIVIVGLFSVIQLTKETEGGNHSSGKSGGFDVKALRAFRVLRPLRLVSGVPSLQVVLNSIIKAMVPLLHIALLVLFVIIIYAIIGLELFIGKMHKTCFFADSDIVAEEDPAPCAFSGNGRQCTANGTECRSGWVGPNGGITNFDNFAFAMLTVFQCITMEGWTDVLYWVNDAIGWEWPWVYFVSLIILGSFFVLNLVLGVLSGEFSKEREKAKRDFQKLREKQQLEEDLKGYLDWITQAEDIDPENEEEGGEEGKRNTSMPTSETESVNTENVSGEGENRGCCGSLWCWWRRRGAAKAGPSGCRRWGQAISKSKLSRRWRRWNRFNRRRCRAAVKSVTFYWLVIVLVFLNTLTISSEHYNQPDWLTQIQDIANKVLLALFTCEMLVKMYSLGLQAYFVSLFNRFDCFVVCGGITETILVELEIMSPLGISVFRCVRLLRIFKVTRHWTSLSNLVASLLNSMKSIASLLLLLFLFIIIFSLLGMQLFGGKFNFDETQTKRSTFDNFPQALLTVFQILTGEDWNAVMYDGIMAYGGPSSSGMIVCIYFIILFICGNYILLNVFLAIAVDNLADAESLNTAQKEEAEEKERKKIARKESLENKKNNKPEVNQIANSDNKVTIDDYREEDEDKDPYPPCDVPVGEEEEEEEEDEPEVPAGPRPRRISELNMKEKIAPIPEGSAFFILSKTNPIRVGCHKLINHHIFTNLILVFIMLSSAAAEDPIRSHSFRNTILGYFDYAFTAIFTVEILLKMTTFGAFLHKGAFCRNYFNLLDMLVVGVSLVSFGIQSSAISVVKILRVLRVLRPLRAINRAKGLKHVVQCVFVAIRTIGNIMIVTTLLQFMFACIGVQLFKGKFYRCTDEAKSNPEECRGLFILYKDGDVDSPVVRERIWQNSDFNFDNVLSAMMALFTVSTFEGWPALLYKAIDSNGENIGPIYNHRVEISIFFIIYIIIVAFFMMNIFVGFVIVTFQEQGEKEYKNCELDKNQRQCVEYALKARPLRRYIPKNPYQYKFWYVVNSSPFEYMMFVLIMLNTLCLAMQHYEQSKMFNDAMDILNMVFTGVFTVEMVLKVIAFKPKHYFTDAWNTFDALIVVGSVVDIAITEVNNSEESNRISITFFRLFRVMRLVKLLSRGEGIRTLLWTFIKSFQALPYVLIAMLFFIYAVIGMQMFGKVAMRDNNQINRNNNFQTFPQAVLLLFRCATGEAWQEIMLACLPGKLCDPESDYNPGEEYTCGSNFAIVYFISFYMLCAFLIINLFVAVIMDNFDYLTRDWSILGPHHLDEFKRIWSEYDPEAKGRIKHLDVVTLLRRIQPPLGFGKLCPHRVACKRLVAMNMPLNSDGTVMFNATLFALVRTALKIKTEGNLEQANEELRAVIKKIWKKTSMKLLDQVVPPAGDDEVTVGKFYATFLIQDYFRKFKKRKEQGLVGKYPAKNTTIALQAGLRTLHDIGPEIRRAISCDLQDDEPEETKREEEDDVFKRNGALLGNHVNHVNSDRRDSLQQTNTTPLHVQRPSIPPASDTEKPLFPPAGNSVCHNHHNHNSIGKQVPTSTNANLNNANMSKAAHGKRPSIGNLEHVSENGHHSSHKHDREPQRRSSVKRTRYYETYIRSDSGDEQLPTICREDPEIHGYFRDPHCLGEQEYFSSEECYEDDSSPTWSRQNYGYYSRYPGRNIDSPRGYHHPQGFLEDDDSPVCYDSRRSPRRRLLPPTPASHRRSSFNFECLRRQSSQEEVPSSPIFPHRTALPLHLMQQQIMAVAGLDSSKAQKYSPSHSTRSWATPPATPPYRDWTPCYTPLIQVEQSEALDQVNGSLPSLHRSSWYTDEPDISYRTFTPASLTVPSSFRNKNSDKQRSADSLVEAVLISEGLGRYARDPKFVSATKHEIADACDLTIDEMESAASTLLNGNVRPRANGDVGPLSHRQDYELQDFGPGYSDEEPDPGRDEEDLADEMICITTL

SEQ ID NO: 1228 - DNA, 8824 bp, Homo sapiens
agaataagggcagggaccgcggctcctacctcttggtgatccccttccccattccgcccccgccccaacgcccagcacagtgccctgcacacagtagtcgctcaataaatgttcgtggatgatgatgatgatgatgatgaaaaaaatgcagcatcaacggcagcagcaagcggaccacgcgaacgaggcaaactatgcaagaggcaccagacttcctctttctggtgaaggaccaacttctcagccgaatagctccaagcaaactgtcctgtcttggcaagctgcaatcgatgctgctagacaggccaaggctgcccaaactatgagcacctctgcacccccacctgtaggatctctctcccaaagaaaacgtcagcaatacgccaagagcaaaaaacagggtaactcgtccaacagccgacctgcccgcgcccttttctgtttatcactcaataaccccatccgaagagcctgcattagtatagtggaatggaaaccatttgacatatttatattattggctatttttgccaattgtgtggccttagctatttacatcccattccctgaagatgattctaattcaacaaatcataacttggaaaaagtagaatatgccttcctgattatttttacagtcgagacatttttgaagattatagcgtatggattattgctacatcctaatgcttatgttaggaatggatggaatttactggattttgttatagtaatagtaggattgtttagtgtaattttggaacaattaaccaaagaaacagaaggcgggaaccactcaagcggcaaatctggaggctttgatgtcaaagccctccgtgcctttcgagtgttgcgaccacttcgactagtgtcaggagtgcccagtttacaagttgtcctgaactccattataaaagccatggttcccctccttcacatagcccttttggtattatttgtaatcataatctatgctattataggattggaactttttattggaaaaatgcacaaaacatgtttttttgctgactcagatatcgtagctgaagaggacccagctccatgtgcgttctcagggaatggacgccagtgtactgccaatggcacggaatgtaggagtggctgggttggcccgaacggaggcatcaccaactttgataactttgcctttgccatgcttactgtgtttcagtgcatcaccatggagggctggacagacgtgctctactgggtaaatgatgcgataggatgggaatggccatgggtgtattttgttagtctgatcatccttggctcatttttcgtccttaacctggttcttggtgtccttagtggagaattctcaaaggaaagagagaaggcaaaagcacggggagatttccagaagctccgggagaagcagcagctggaggaggatctaaagggctacttggattggatcacccaagctgaggacatcgatccggagaatgaggaagaaggaggagaggaaggcaaacgaaatactagcatgcccaccagcgagactgagtctgtgaacacagagaacgtcagcggtgaaggcgagaaccgaggctgctgtggaagtctctggtgctggtggagacggagaggcgcggccaaggcggggccctctgggtgtcggcggtggggtcaagccatctcaaaatccaaactcagccgacgctggcgtcgctggaaccgattcaatcgcagaagatgtagggccgccgtgaagtctgtcacgttttactggctggttatcgtcctggtgtttctgaacaccttaaccatttcctctgagcactacaatcagccagattggttgacacagattcaagatattgccaacaaagtcctcttggctctgttcacctgcgagatgctggtaaaaatgtacagcttgggcctccaagcatatttcgtctctcttttcaaccggtttgattgcttcgtggtgtgtggtggaatcactgagacgatcttggtggaactggaaatcatgtctcccctggggatctctgtgtttcggtgtgtgcgcctcttaagaatcttcaaagtgaccaggcactggacttccctgagcaacttagtggcatccttattaaactccatgaagtccatcgcttcgctgttgcttctgctttttctcttcattatcatcttttccttgcttgggatgcagctgtttggcggcaagtttaattttgatgaaacgcaaaccaagcggagcacctttgacaatttccctcaagcacttctcacagtgttccagatcctgacaggcgaagactggaatgctgtgatgtacgatggcatcatggcttacgggggcccatcctcttcaggaatgatcgtctgcatctacttcatcatcctcttcatttgtggtaactatattctactgaatgtcttcttggccatcgctgtagacaatttggctgatgctgaaagtctgaacactgctcagaaagaagaagcggaagaaaaggagaggaaaaagattgccagaaaagagagcctagaaaataaaaagaacaacaaaccagaagtcaaccagatagccaacagtgacaacaaggttacaattgatgactatagagaagaggatgaagacaaggacccctatccgccttgcgatgtgccagtaggggaagaggaagaggaagaggaggaggatgaacctgaggttcctgccggaccccgtcctcgaaggatctcggagttgaacatgaaggaaaaaattgcccccatccctgaagggagcgctttcttcattcttagcaagaccaacccgatccgcgtaggctgccacaagctcatcaaccaccacatcttcaccaacctcatccttgtcttcatcatgctgagcagcgctgccctggccgcagaggaccccatccgcagccactccttccggaacacgatactgggttactttgactatgccttcacagccatctttactgttgagatcctgttgaagatgacaacttttggagctttcctccacaaaggggccttctgcaggaactacttcaatttgctggatatgctggtggttggggtgtctctggtgtcatttgggattcaatccagtgccatctccgttgtgaagattctgagggtcttaagggtcctgcgtcccctcagggccatcaacagagcaaaaggacttaagcacgtggtccagtgcgtcttcgtggccatccggaccatcggcaacatcatgatcgtcaccaccctcctgcagttcatgtttgcctgtatcggggtccagttgttcaaggggaagttctatcgctgtacggatgaagccaaaagtaaccctgaagaatgcaggggacttttcatcctctacaaggatggggatgttgacagtcctgtggtccgtgaacggatctggcaaaacagtgatttcaacttcgacaacgtcctctctgctatgatggcgctcttcacagtctccacgtttgagggctggcctgcgttgctgtataaagccatcgactcgaatggagagaacatcggcccaatctacaaccaccgcgtggagatctccatcttcttcatcatctacatcatcattgtagctttcttcatgatgaacatctttgtgggctttgtcatcgttacatttcaggaacaaggagaaaaagagtataagaactgtgagctggacaaaaatcagcgtcagtgtgttgaatacgccttgaaagcacgtcccttgcggagatacatccccaaaaacccctaccagtacaagttctggtacgtggtgaactcttcgcctttcgaatacatgatgtttgtcctcatcatgctcaacacactctgcttggccatgcagcactacgagcagtccaagatgttcaatgatgccatggacattctgaacatggtcttcaccggggtgttcaccgtcgagatggttttgaaagtcatcgcatttaagcctaagaactctgaagagagcaatagaatctccatcacctttttccgtcttttccgagtgatgcgattggtgaagcttctcagcaggggggaaggcatccggacattgctgtggacttttattaagtcctttcaggcgctcccgtatgtggccctcctcatagccatgctgttcttcatctatgcggtcattggcatgcagatgtttgggaaagttgccatgagagataacaaccagatcaataggaacaataacttccagacgtttccccaggcggtgctgctgctcttcaggtgtgcaacaggtgaggcctggcaggagatcatgctggcctgtctcccagggaagctctgtgaccctgagtcagattacaaccccggggaggagtatacatgtgggagcaactttgccattgtctatttcatcagtttttacatgctctgtgcatttctgatcatcaatctgtttgtggctgtcatcatggataatttcgactatctgacccgggactggtctattttggggcctcaccatttagatgaattcaaaagaatatggtcagaatatgaccctgaggcaaagggaaggataaaacaccttgatgtggtcactctgcttcgacgcatccagcctcccctggggtttgggaagttatgtccacacagggtagcgtgcaagagattagttgccatgaacatgcctctcaacagtgacgggacagtcatgtttaatgcaaccctgtttgctttggttcgaacggctcttaagatcaagaccgaagggaacctggagcaagctaatgaagaacttcgggctgtgataaagaaaatttggaagaaaaccagcatgaaattacttgaccaagttgtccctccagctggtgatgatgaggtaaccgtggggaagttctatgccactttcctgatacaggactactttaggaaattcaagaaacggaaagaacaaggactggtgggaaagtaccctgcgaagaacaccacaattgccctacaggcgggattaaggacactgcatgacattgggccagaaatccggcgtgctatatcgtgtgatttgcaagatgacgagcctgaggaaacaaaacgagaagaagaagatgatgtgttcaaaagaaatggtgccctgcttggaaaccatgtcaatcatgttaatagtgataggagagattcccttcagcagaccaataccacccaccgtcccctgcatgtccaaaggccttcaattccacctgcaagtgatactgagaaaccgctgtttcctccagcaggaaattcggtgtgtcataaccatcataaccataattccataggaaagcaagttcccacctcaacaaatgccaatctcaataatgccaatatgtccaaagctgcccatggaaagcggcccagcattgggaaccttgagcatgtgtctgaaaatgggcatcattcttcccacaagcatgaccgggagcctcagagaaggtccagtgtgaaaagaacccgctattatgaaacttacattaggtccgactcaggagatgaacagctcccaactatttgccgggaagacccagagatacatggctatttcagggacccccactgcttgggggagcaggagtatttcagtagtgaggaatgctacgaggatgacagctcgcccacctggagcaggcaaaactatggctactacagcagatacccaggcagaaacatcgactctgagaggccccgaggctaccatcatccccaaggattcttggaggacgatgactcgcccgtttgctatgattcacggagatctccaaggagacgcctactacctcccaccccagcatcccaccggagatcctccttcaactttgagtgcctgcgccggcagagcagccaggaagaggtcccgtcgtctcccatcttcccccatcgcacggccctgcctctgcatctaatgcagcaacagatcatggcagttgccggcctagattcaagtaaagcccagaagtactcaccgagtcactcgacccggtcgtgggccacccctccagcaacccctccctaccgggactggacaccgtgctacacccccctgatccaagtggagcagtcagaggccctggaccaggtgaacggcagcctgccgtccctgcaccgcagctcctggtacacagacgagcccgacatctcctaccggactttcacaccagccagcctgactgtccccagcagcttccggaacaaaaacagcgacaagcagaggagtgcggacagcttggtggaggcagtcctgatatccgaaggcttgggacgctatgcaagggacccaaaatttgtgtcagcaacaaaacacgaaatcgctgatgcctgtgacctcaccatcgacgagatggagagtgcagccagcaccctgcttaatgggaacgtgcgtccccgagccaacggggatgtgggccccctctcacaccggcaggactatgagctacaggactttggtcctggctacagcgacgaagagccagaccctgggagggatgaggaggacctggcggatgaaatgatatgcatcaccaccttgtagcccccagcgaggggcagactggctctggcctcaggtggggcgcaggagagccaggggaaaagtgcctcatagttaggaaagtttaggcactagttgggagtaatattcaattaattagacttttgtataagagatgtcatgcctcaagaaagccataaacctggtaggaacaggtcccaagcggttgagcctggcagagtaccatgcgctcggccccagctgcaggaaacagcaggccccgccctctcacagaggatgggtgaggaggccagacctgccctgccccattgtccagatgggcactgctgtggagtctgcttctcccatgtaccagggcaccaggcccacccaactgaaggcatggcggcggggtgcaggggaaagttaaaggtgatgacgatcatcacacctgtgtcgttacctcagccatcggtctagcatatcagtcactgggcccaacatatccatttttaaaccctttcccccaaatacactgcgtcctggttcctgtttagctgttctgaaatacggtgtgtaagtaagtcagaacccagctaccagtgattattgcgagggcaatgggacctcataaataaggttttctgtgatgtgacgccagtttacataagagaatatcactccgatggtcggtttctgactgtcacgctaagggcaactgtaaactggaataataatgcactcgcaaccaggtaaacttagatacactagtttgtttaaaattatagatttactgtacatgacttgtaatatactataatttgtatttgtaaagagatggtctatattttgtaattactgtattgtatttgaactgcagcaatatccatgggtcctaataattgtagttccccactaaaatctagaaattattagtatttttactcgggctatccagaagtagaagaaatagagccaattctcatttattcagcgaaaatcctctggggttaaaattttaagtttgaaagaacttgacactacagaaatttttctaaaatattttgagtcactataaacctatcatctttccacaagatataccagatgactatttgcagtcttttctttgggcaagagttccatgattttgatactgtacctttggatccaccatgggttgcaactgtctttggttttgtttgtttgacttgaaccaccctctgaagtaagtaagtgaattacagagcaggtccagctggctgctctgccccttgggtatccatagttacggttttctctgtggcccacccagggtgttttttgcatcgctggtgcagaaatgcataggtggatgagatatagctgctcttgtcctctggggactggtggtgctgcttaagaaataaggggtgctggggacagaggagcaacgtggtgatctataggattggagtgtcggggtctgtacaaatcgtattgttgccttttacaaaactgctgtactgtatgttctctttgagggcttttatatgcaattgaatgagggctgaagttttcattagaatgcactcacactctgactgtacgtcctgatgaaaacccacttttggataattagaaccgtcaaggcttcattttctgtcaacagaattaggccgactgtcaggttaccttggcagggattccctgcaatcaaaaagatagatgataggtagcaattttggtccaaaatttttaatagtatacagacaacctgttaatttttttttttttttttttttttgtaaataacaaacaccactttgttatgaagaccttacaaacctcttcttaagacattcttactctgatccaggcaaaaacacttcaaggtttgtaaatgactctttcctgacataaatccttttttattaaaatgcaaaatgttcttcagaataaaactgtgtaataatttttatacttgggagtgctccttgcacagagctgtcatttgccagtgagagcctccgacagggcaggtactgtgccagggcagctctgaaattatggatattcttatcctcctggttccttcggtgccaatggtaacctaataccagccgcagggagcgccatttctcctaaagggctacaccactgtcaacattatcctggactctgtgtctctctctgttgggtcttgtggcatcacatcaggccaaaattgccagaccaggaccctaagtgtctgatagaggcgatgatcttttccaaagtcagtacttacaaactggcattcttacaggctgcaccatttcctagtatgtctgctttaagcctggttcaacc

SEQ ID NO: 1229 - protein, 2122 aa, Homo sapiens
MMMMMMMKKMQHQRQQQADHANEANYRTRLPLSGEGPTSQPNSSKQTVLSWQAAIDAARQAKAAQTMSTSAPPPVGSLSQRKRQQYAKSKKQGNSSNSRPARALFCLSLNNPIRRACISIVEWKPFDIFILLAIFANCVAIYIPFPEDDSNSTNHNLEKVEYAFLIIFTVETFLKIIAYGLLLHPNAYVRNGWNLLDFVIVIVGLFSVIQLTKETEGGNHSSGKSGGFDVKALRAFRVLRPLRLVSGVPSLQVVLNSIIKAMVPLLHIALLVLFVIIIYAIIGLELFIGKMHKTCFFADSDIVAEEDPAPCAFSGNGRQCTANGTECRSGWVGPNGGITNFDNFAFAMLTVFQCITMEGWTDVLYWVNDAIGWEWPWVYFVSLIILGSFFVLNLVLGVLSGEFSKEREKAKRDFQKLREKQQLEEDLKGYLDWITQAEDIDPENEEEGGEEGKRNTSMPTSETESVNTENVSGEGENRGCCGSLWCWWRRRGAAKAGPSGCRRWGQAISKSKLSRRWRRWNRFNRRRCRAAVKSVTFYWLVIVLVFLNTLTISSEHYNQPDWLTQIQDIANKVLLALFTCEMLVKMYSLGLQAYFVSLFNRFDCFVVCGGITETILVELEIMSPLGISVFRCVRLLRIFKVTRHWTSLSNLVASLLNSMKSIASLLLLLFLFIIIFSLLGMQLFGGKFNFDETQTKRSTFDNFPQALLTVFQILTGEDWNAVMYDGIMAYGGPSSSGMIVCIYFIILFICGNYILLNVFLAIAVDNLADAESLNTAQKEEAEEKERKKIARKESLENKKNNKPEVNQIANSDNKVTIDDYREEDEDKDPYPPCDVPVGEEEEEEEEDEPEVPAGPRPRRISELNMKEKIAPIPEGSAFFILSKTNPIRVGCHKLINHHIFTNLILVFIMLSSAAAEDPIRSHSFRNTILGYFDYAFTAIFTVEILLKMTTFGAFLHKGAFCRNYFNLLDMLVVGVSLVSFGIQSSAISVVKILRVLRVLRPLRAINRAKGLKHVVQCVFVAIRTIGNIMIVTTLLQFMFACIGVQLFKGKFYRCTDEAKSNPEECRGLFILYKDGDVDSPVVRERIWQNSDFNFDNVLSAMMALFTVSTFEGWPALLYKAIDSNGENIGPIYNHRVEISIFFIIYIIIVAFFMMNIFVGFVIVTFQEQGEKEYKNCELDKNQRQCVEYALKARPLRRYIPKNPYQYKFWYVVNSSPFEYMMFVLIMLNTLCLAMQHYEQSKMFNDAMDILNMVFTGVFTVEMVLKVIAFKPKNSEESNRISITFFRLFRVMRLVKLLSRGEGIRTLLWTFIKSFQALPYVLIAMLFFIYAVIGMQMFGKVAMRDNNQINRNNNFQTFPQAVLLLFRCATGEAWQEIMLACLPGKLCDPESDYNPGEEYTCGSNFAIVYFISFYMLCAFLIINLFVAVIMDNFDYLTRDWSILGPHHLDEFKRIWSEYDPEAKGRIKHLDVVTLLRRIQPPLGFGKLCPHRVACKRLVAMNMPLNSDGTVMFNATLFALVRTALKIKTEGNLEQANEELRAVIKKIWKKTSMKLLDQVVPPAGDDEVTVGKFYATFLIQDYFRKFKKRKEQGLVGKYPAKNTTIALQAGLRTLHDIGPEIRRAISCDLQDDEPEETKREEEDDVFKRNGALLGNHVNHVNSDRRDSLQQTNTTPLHVQRPSIPPASDTEKPLFPPAGNSVCHNHHNHNSIGKQVPTSTNANLNNANMSKAAHGKRPSIGNLEHVSENGHHSSHKHDREPQRRSSVKRTRYYETYIRSDSGDEQLPTICREDPEIHGYFRDPHCLGEQEYFSSEECYEDDSSPTWSRQNYGYYSRYPGRNIDSPRGYHHPQGFLEDDDSPVCYDSRRSPRRRLLPPTPASHRRSSFNFECLRRQSSQEEVPSSPIFPHRTALPLHLMQQQIMAVAGLDSSKAQKYSPSHSTRSWATPPATPPYRDWTPCYTPLIQVEQSEALDQVNGSLPSLHRSSWYTDEPDISYRTFTPASLTVPSSFRNKNSDKQRSADSLVEAVLISEGLGRYARDPKFVSATKHEIADACDLTIDEMESAASTLLNGNVRPRANGDVGPLSHRQDYELQDFGPGYSDEEPDPGRDEEDLADEMICITTL

SEQ ID NO: 1230 - DNA, 8953 bp, Homo sapiens
agaataagggcagggaccgcggctcctacctcttggtgatccccttccccattccgcccccgccccaacgcccagcacagtgccctgcacacagtagtcgctcaataaatgttcgtggatgatgatgatgatgatgatgaaaaaaatgcagcatcaacggcagcagcaagcggaccacgcgaacgaggcaaactatgcaagaggcaccagacttcctctttctggtgaaggaccaacttctcagccgaatagctccaagcaaactgtcctgtcttggcaagctgcaatcgatgctgctagacaggccaaggctgcccaaactatgagcacctctgcacccccacctgtaggatctctctcccaaagaaaacgtcagcaatacgccaagagcaaaaaacagggtaactcgtccaacagccgacctgcccgcgcccttttctgtttatcactcaataaccccatccgaagagcctgcattagtatagtggaatggaaaccatttgacatatttatattattggctatttttgccaattgtgtggccttagctatttacatcccattccctgaagatgattctaattcaacaaatcataacttggaaaaagtagaatatgccttcctgattatttttacagtcgagacatttttgaagattatagcgtatggattattgctacatcctaatgcttatgttaggaatggatggaatttactggattttgttatagtaatagtaggattgtttagtgtaattttggaacaattaaccaaagaaacagaaggcgggaaccactcaagcggcaaatctggaggctttgatgtcaaagccctccgtgcctttcgagtgttgcgaccacttcgactagtgtcaggagtgcccagtttacaagttgtcctgaactccattataaaagccatggttcccctccttcacatagcccttttggtattatttgtaatcataatctatgctattataggattggaactttttattggaaaaatgcacaaaacatgtttttttgctgactcagatatcgtagctgaagaggacccagctccatgtgcgttctcagggaatggacgccagtgtactgccaatggcacggaatgtaggagtggctgggttggcccgaacggaggcatcaccaactttgataactttgcctttgccatgcttactgtgtttcagtgcatcaccatggagggctggacagacgtgctctactgggtaaatgatgcgataggatgggaatggccatgggtgtattttgttagtctgatcatccttggctcatttttcgtccttaacctggttcttggtgtccttagtggagaattctcaaaggaaagagagaaggcaaaagcacggggagatttccagaagctccgggagaagcagcagctggaggaggatctaaagggctacttggattggatcacccaagctgaggacatcgatccggagaatgaggaagaaggaggagaggaaggcaaacgaaatactagcatgcccaccagcgagactgagtctgtgaacacagagaacgtcagcggtgaaggcgagaaccgaggctgctgtggaagtctctggtgctggtggagacggagaggcgcggccaaggcggggccctctgggtgtcggcggtggggtcaagccatctcaaaatccaaactcagccgacgctggcgtcgctggaaccgattcaatcgcagaagatgtagggccgccgtgaagtctgtcacgttttactggctggttatcgtcctggtgtttctgaacaccttaaccatttcctctgagcactacaatcagccagattggttgacacagattcaagatattgccaacaaagtcctcttggctctgttcacctgcgagatgctggtaaaaatgtacagcttgggcctccaagcatatttcgtctctcttttcaaccggtttgattgcttcgtggtgtgtggtggaatcactgagacgatcttggtggaactggaaatcatgtctcccctggggatctctgtgtttcggtgtgtgcgcctcttaagaatcttcaaagtgaccaggcactggacttccctgagcaacttagtggcatccttattaaactccatgaagtccatcgcttcgctgttgcttctgctttttctcttcattatcatcttttccttgcttgggatgcagctgtttggcggcaagtttaattttgatgaaacgcaaaccaagcggagcacctttgacaatttccctcaagcacttctcacagtgttccagatcctgacaggcgaagactggaatgctgtgatgtacgatggcatcatggcttacgggggcccatcctcttcaggaatgatcgtctgcatctacttcatcatcctcttcatttgtggtaactatattctactgaatgtcttcttggccatcgctgtagacaatttggctgatgctgaaagtctgaacactgctcagaaagaagaagcggaagaaaaggagaggaaaaagattgccagaaaagagagcctagaaaataaaaagaacaacaaaccagaagtcaaccagatagccaacagtgacaacaaggttacaattgatgactatagagaagaggatgaagacaaggacccctatccgccttgcgatgtgccagtaggggaagaggaagaggaagaggaggaggatgaacctgaggttcctgccggaccccgtcctcgaaggatctcggagttgaacatgaaggaaaaaattgcccccatccctgaagggagcgctttcttcattcttagcaagaccaacccgatccgcgtaggctgccacaagctcatcaaccaccacatcttcaccaacctcatccttgtcttcatcatgctgagcagcgctgccctggccgcagaggaccccatccgcagccactccttccggaacacgatactgggttactttgactatgccttcacagccatctttactgttgagatcctgttgaagatgacaacttttggagctttcctccacaaaggggccttctgcaggaactacttcaatttgctggatatgctggtggttggggtgtctctggtgtcatttgggattcaatccagtgccatctccgttgtgaagattctgagggtcttaagggtcctgcgtcccctcagggccatcaacagagcaaaaggacttaagcacgtggtccagtgcgtcttcgtggccatccggaccatcggcaacatcatgatcgtcaccaccctcctgcagttcatgtttgcctgtatcggggtccagttgttcaaggggaagttctatcgctgtacggatgaagccaaaagtaaccctgaagaatgcaggggacttttcatcctctacaaggatggggatgttgacagtcctgtggtccgtgaacggatctggcaaaacagtgatttcaacttcgacaacgtcctctctgctatgatggcgctcttcacagtctccacgtttgagggctggcctgcgttgctgtataaagccatcgactcgaatggagagaacatcggcccaatctacaaccaccgcgtggagatctccatcttcttcatcatctacatcatcattgtagctttcttcatgatgaacatctttgtgggctttgtcatcgttacatttcaggaacaaggagaaaaagagtataagaactgtgagctggacaaaaatcagcgtcagtgtgttgaatacgccttgaaagcacgtcccttgcggagatacatccccaaaaacccctaccagtacaagttctggtacgtggtgaactcttcgcctttcgaatacatgatgtttgtcctcatcatgctcaacacactctgcttggccatgcagcactacgagcagtccaagatgttcaatgatgccatggacattctgaacatggtcttcaccggggtgttcaccgtcgagatggttttgaaagtcatcgcatttaagcctaaggggtattttagtgacgcctggaacacgtttgactccctcatcgtaatcggcagcattatagacgtggccctcagcgaagcagacccaactgaaagtgaaaatgtccctgtcccaactgctacacctgggaactctgaagagagcaatagaatctccatcacctttttccgtcttttccgagtgatgcgattggtgaagcttctcagcaggggggaaggcatccggacattgctgtggacttttattaagtcctttcaggcgctcccgtatgtggccctcctcatagccatgctgttcttcatctatgcggtcattggcatgcagatgtttgggaaagttgccatgagagataacaaccagatcaataggaacaataacttccagacgtttccccaggcggtgctgctgctcttcaggtgtgcaacaggtgaggcctggcaggagatcatgctggcctgtctcccagggaagctctgtgaccctgagtcagattacaaccccggggaggagtatacatgtgggagcaactttgccattgtctatttcatcagtttttacatgctctgtgcatttctgatcatcaatctgtttgtggctgtcatcatggataatttcgactatctgacccgggactggtctattttggggcctcaccatttagatgaattcaaaagaatatggtcagaatatgaccctgaggcaaagggaaggataaaacaccttgatgtggtcactctgcttcgacgcatccagcctcccctggggtttgggaagttatgtccacacagggtagcgtgcaagagattagttgccatgaacatgcctctcaacagtgacgggacagtcatgtttaatgcaaccctgtttgctttggttcgaacggctcttaagatcaagaccgaagggaacctggagcaagctaatgaagaacttcgggctgtgataaagaaaatttggaagaaaaccagcatgaaattacttgaccaagttgtccctccagctggtgatgatgaggtaaccgtggggaagttctatgccactttcctgatacaggactactttaggaaattcaagaaacggaaagaacaaggactggtgggaaagtaccctgcgaagaacaccacaattgccctacaggcgggattaaggacactgcatgacattgggccagaaatccggcgtgctatatcgtgtgatttgcaagatgacgagcctgaggaaacaaaacgagaagaagaagatgatgtgttcaaaagaaatggtgccctgcttggaaaccatgtcaatcatgttaatagtgataggagagattcccttcagcagaccaataccacccaccgtcccctgcatgtccaaaggccttcaattccacctgcaagtgatactgagaaaccgctgtttcctccagcaggaaattcggtgtgtcataaccatcataaccataattccataggaaagcaagttcccacctcaacaaatgccaatctcaataatgccaatatgtccaaagctgcccatggaaagcggcccagcattgggaaccttgagcatgtgtctgaaaatgggcatcattcttcccacaagcatgaccgggagcctcagagaaggtccagtgtgaaaagaacccgctattatgaaacttacattaggtccgactcaggagatgaacagctcccaactatttgccgggaagacccagagatacatggctatttcagggacccccactgcttgggggagcaggagtatttcagtagtgaggaatgctacgaggatgacagctcgcccacctggagcaggcaaaactatggctactacagcagatacccaggcagaaacatcgactctgagaggccccgaggctaccatcatccccaaggattcttggaggacgatgactcgcccgtttgctatgattcacggagatctccaaggagacgcctactacctcccaccccagcatcccaccggagatcctccttcaactttgagtgcctgcgccggcagagcagccaggaagaggtcccgtcgtctcccatcttcccccatcgcacggccctgcctctgcatctaatgcagcaacagatcatggcagttgccggcctagattcaagtaaagcccagaagtactcaccgagtcactcgacccggtcgtgggccacccctccagcaacccctccctaccgggactggacaccgtgctacacccccctgatccaagtggagcagtcagaggccctggaccaggtgaacggcagcctgccgtccctgcaccgcagctcctggtacacagacgagcccgacatctcctaccggactttcacaccagccagcctgactgtccccagcagcttccggaacaaaaacagcgacaagcagaggagtgcggacagcttggtggaggcagtcctgatatccgaaggcttgggacgctatgcaagggacccaaaatttgtgtcagcaacaaaacacgaaatcgctgatgcctgtgacctcaccatcgacgagatggagagtgcagccagcaccctgcttaatgggaacgtgcgtccccgagccaacggggatgtgggccccctctcacaccggcaggactatgagctacaggactttggtcctggctacagcgacgaagagccagaccctgggagggatgaggaggacctggcggatgaaatgatatgcatcaccaccttgtagcccccagcgaggggcagactggctctggcctcaggtggggcgcaggagagccaggggaaaagtgcctcatagttaggaaagtttaggcactagttgggagtaatattcaattaattagacttttgtataagagatgtcatgcctcaagaaagccataaacctggtaggaacaggtcccaagcggttgagcctggcagagtaccatgcgctcggccccagctgcaggaaacagcaggccccgccctctcacagaggatgggtgaggaggccagacctgccctgccccattgtccagatgggcactgctgtggagtctgcttctcccatgtaccagggcaccaggcccacccaactgaaggcatggcggcggggtgcaggggaaagttaaaggtgatgacgatcatcacacctgtgtcgttacctcagccatcggtctagcatatcagtcactgggcccaacatatccatttttaaaccctttcccccaaatacactgcgtcctggttcctgtttagctgttctgaaatacggtgtgtaagtaagtcagaacccagctaccagtgattattgcgagggcaatgggacctcataaataaggttttctgtgatgtgacgccagtttacataagagaatatcactccgatggtcggtttctgactgtcacgctaagggcaactgtaaactggaataataatgcactcgcaaccaggtaaacttagatacactagtttgtttaaaattatagatttactgtacatgacttgtaatatactataatttgtatttgtaaagagatggtctatattttgtaattactgtattgtatttgaactgcagcaatatccatgggtcctaataattgtagttccccactaaaatctagaaattattagtatttttactcgggctatccagaagtagaagaaatagagccaattctcatttattcagcgaaaatcctctggggttaaaattttaagtttgaaagaacttgacactacagaaatttttctaaaatattttgagtcactataaacctatcatctttccacaagatataccagatgactatttgcagtcttttctttgggcaagagttccatgattttgatactgtacctttggatccaccatgggttgcaactgtctttggttttgtttgtttgacttgaaccaccctctgaagtaagtaagtgaattacagagcaggtccagctggctgctctgccccttgggtatccatagttacggttttctctgtggcccacccagggtgttttttgcatcgctggtgcagaaatgcataggtggatgagatatagctgctcttgtcctctggggactggtggtgctgcttaagaaataaggggtgctggggacagaggagcaacgtggtgatctataggattggagtgtcggggtctgtacaaatcgtattgttgccttttacaaaactgctgtactgtatgttctctttgagggcttttatatgcaattgaatgagggctgaagttttcattagaatgcactcacactctgactgtacgtcctgatgaaaacccacttttggataattagaaccgtcaaggcttcattttctgtcaacagaattaggccgactgtcaggttaccttggcagggattccctgcaatcaaaaagatagatgataggtagcaattttggtccaaaatttttaatagtatacagacaacctgttaatttttttttttttttttttttttgtaaataacaaacaccactttgttatgaagaccttacaaacctcttcttaagacattcttactctgatccaggcaaaaacacttcaaggtttgtaaatgactctttcctgacataaatccttttttattaaaatgcaaaatgttcttcagaataaaactgtgtaataatttttatacttgggagtgctccttgcacagagctgtcatttgccagtgagagcctccgacagggcaggtactgtgccagggcagctctgaaattatggatattcttatcctcctggttccttcggtgccaatggtaacctaataccagccgcagggagcgccatttctcctaaagggctacaccactgtcaacattatcctggactctgtgtctctctctgttgggtcttgtggcatcacatcaggccaaaattgccagaccaggaccctaagtgtctgatagaggcgatgatcttttccaaagtcagtacttacaaactggcattcttacaggctgcaccatttcctagtatgtctgctttaagcctggttcaacc

SEQ ID NO: 1231 - protein, 2163 aa, Homo sapiens
MMMMMMMKKMQHQRQQQADHANEANYRTRLPLSGEGPTSQPNSSKQTVLSWQAAIDAARQAKAAQTMSTSAPPPVGSLSQRKRQQYAKSKKQGNSSNSRPARALFCLSLNNPIRRACISIVEWKPFDIFILLAIFANCVAIYIPFPEDDSNSTNHNLEKVEYAFLIIFTVETFLKIIAYGLLLHPNAYVRNGWNLLDFVIVIVGLFSVIQLTKETEGGNHSSGKSGGFDVKALRAFRVLRPLRLVSGVPSLQVVLNSIIKAMVPLLHIALLVLFVIIIYAIIGLELFIGKMHKTCFFADSDIVAEEDPAPCAFSGNGRQCTANGTECRSGWVGPNGGITNFDNFAFAMLTVFQCITMEGWTDVLYWVNDAIGWEWPWVYFVSLIILGSFFVLNLVLGVLSGEFSKEREKAKRDFQKLREKQQLEEDLKGYLDWITQAEDIDPENEEEGGEEGKRNTSMPTSETESVNTENVSGEGENRGCCGSLWCWWRRRGAAKAGPSGCRRWGQAISKSKLSRRWRRWNRFNRRRCRAAVKSVTFYWLVIVLVFLNTLTISSEHYNQPDWLTQIQDIANKVLLALFTCEMLVKMYSLGLQAYFVSLFNRFDCFVVCGGITETILVELEIMSPLGISVFRCVRLLRIFKVTRHWTSLSNLVASLLNSMKSIASLLLLLFLFIIIFSLLGMQLFGGKFNFDETQTKRSTFDNFPQALLTVFQILTGEDWNAVMYDGIMAYGGPSSSGMIVCIYFIILFICGNYILLNVFLAIAVDNLADAESLNTAQKEEAEEKERKKIARKESLENKKNNKPEVNQIANSDNKVTIDDYREEDEDKDPYPPCDVPVGEEEEEEEEDEPEVPAGPRPRRISELNMKEKIAPIPEGSAFFILSKTNPIRVGCHKLINHHIFTNLILVFIMLSSAAAEDPIRSHSFRNTILGYFDYAFTAIFTVEILLKMTTFGAFLHKGAFCRNYFNLLDMLVVGVSLVSFGIQSSAISVVKILRVLRVLRPLRAINRAKGLKHVVQCVFVAIRTIGNIMIVTTLLQFMFACIGVQLFKGKFYRCTDEAKSNPEECRGLFILYKDGDVDSPVVRERIWQNSDFNFDNVLSAMMALFTVSTFEGWPALLYKAIDSNGENIGPIYNHRVEISIFFIIYIIIVAFFMMNIFVGFVIVTFQEQGEKEYKNCELDKNQRQCVEYALKARPLRRYIPKNPYQYKFWYVVNSSPFEYMMFVLIMLNTLCLAMQHYEQSKMFNDAMDILNMVFTGVFTVEMVLKVIAFKPKGYFSDAWNTFDSLIVIGSIIDVSEADPTESENVPVPTATPGNSEESNRISITFFRLFRVMRLVKLLSRGEGIRTLLWTFIKSFQALPYVLIAMLFFIYAVIGMQMFGKVAMRDNNQINRNNNFQTFPQAVLLLFRCATGEAWQEIMLACLPGKLCDPESDYNPGEEYTCGSNFAIVYFISFYMLCAFLIINLFVAVIMDNFDYLTRDWSILGPHHLDEFKRIWSEYDPEAKGRIKHLDVVTLLRRIQPPLGFGKLCPHRVACKRLVAMNMPLNSDGTVMFNATLFALVRTALKIKTEGNLEQANEELRAVIKKIWKKTSMKLLDQVVPPAGDDEVTVGKFYATFLIQDYFRKFKKRKEQGLVGKYPAKNTTIALQAGLRTLHDIGPEIRRAISCDLQDDEPEETKREEEDDVFKRNGALLGNHVNHVNSDRRDSLQQTNTTPLHVQRPSIPPASDTEKPLFPPAGNSVCHNHHNHNSIGKQVPTSTNANLNNANMSKAAHGKRPSIGNLEHVSENGHHSSHKHDREPQRRSSVKRTRYYETYIRSDSGDEQLPTICREDPEIHGYFRDPHCLGEQEYFSSEECYEDDSSPTWSRQNYGYYSRYPGRNIDSPRGYHHPQGFLEDDDSPVCYDSRRSPRRRLLPPTPASHRRSSFNFECLRRQSSQEEVPSSPIFPHRTALPLHLMQQQIMAVAGLDSSKAQKYSPSHSTRSWATPPATPPYRDWTPCYTPLIQVEQSEALDQVNGSLPSLHRSSWYTDEPDISYRTFTPASLTVPSSFRNKNSDKQRSADSLVEAVLISEGLGRYARDPKFVSATKHEIADACDLTIDEMESAASTLLNGNVRPRANGDVGPLSHRQDYELQDFGPGYSDEEPDPGRDEEDLADEMICITTL

SEQ ID NO: 1232 - DNA, 247654 bp, Mus musculus
  misc_feature (1)...(247654): n = A,T,C or G
ggttcataaaagacacatgactccaaatctgaagctctgagctggaaccctggggaagaactgagtcctgccagctgtcctctgacctccatgtgcaccactgaacatgtacacatacatgtatgttctctctctctcacgtatgctctctctctcataccaaatgaataagggtaataaaactattgttctagcaagtccttagtgtgcatgacataacacctggcttgaaatctgatcctagactgtgctgcgctcctttggaaagttaagtttttaacctactgtacttcacttctgttgtggctgtaactgaggtaactgactttggcgatggttgacttttgtgctgtgaagaacttctgaaactcacaaggcctctgctttgctttagagaccgtgtctcacgtagcccagaacagcctagaactttctatacagccggggatcaccttaaacttctgctcctcctgcgtgctgggattgcaggacgctccaccaggctggggttatagggtaccgaggataaagtgtgggcttcgttcccgccccacaagaactcttccagctacaccatgttctcagcctgtcgcacgctctgtcgtatggaataattatactacttccttaaaaaacaaaaacacttaatctttctttattttaaggttgacttagaaaacttggaaggatctatatttgctttgagttttaatcacctataatctcacaatatttactgttagagttctggaacattttgttttggtcttgtttagtttcatgcattctggaacagagtgggctcagtggttttgcattctcatacgactatttttctaatttttattgtttggggacttgaaagcaaacctagagccaagcctctgagtgctaagctgggtatggcgggctgtgcctgtagtcccggtgtttgggaaactggggcatgagatcagcttgaggctgggagttctagggcagtcttagacgtacagtgacgttgctgtctcctaaacaagaaggccaactatagtacaaaggccttagctcagtcctcagcactgagggtgggcctggacaatttgaagggtctacttgatttagtagaggatcccgagacataggtcagagaagctgtgaactgtatgtggctgtctttcaactctcctgcggtcttgctgatctcttcacaattgatctcttgccaattgcttcaccatcatccttgccttttgtgctggaagctctttgctctagattggctccttgtccaccatctggcttccggccaccctccaaggagccgtctctaggtactcataaacacataggttagtgacttatcacctggatgtcattaaaattcctaaagtgaaatgcttggatcaaaaaactcgtagtaaatcttgcgaaattgttttctgaagaggcacttggtactagttctctagggtggtgtaaaagaaatgggccccaggtagcactgaaaagccaagtttgttttatttagcctacagatttagttttattattagggtgtgagagttttgcccaaatgtatatatgtgtatgatgtgaatttttggttcaggcagaggtcaaaagagggtgttggatctccaggaactggagggacagagagttggcaagggatgagggtgctggggtcaatatctgtccttgggaagagcagccagtgtttataacccctgatcgaacaggcatggtcacatgacctgcgcactcttttggaaggtgaaatgagtggtgtcaatggtcatccactggtgaggacaatgttgtccattgaaatataaaatgacacaaactgcataattttagattttagtaagatataagaacagaaacaaagcagaacagaacaaaacaaaacaaaacaccctgtgtgtctaaattttatcatttaaatctacagtcagtgtaaaaaaaaatcaggtttgggaggcttcaactgtactcaagggctatggtctccttcccgtgtccccttagctttccctttcttatgggagataaacaactcagagtggggcaggggagcagcagggcatcgggatcctaccctgtcaacaacactggcagacagacttccaatggtgaggcagccgatttgggatattcacgtgcttgccttggtcacaggttgaggtgttttgactggtgtgtggccccagtgccagaaagggcccttaagcaaagagatgttaatgagccggatactttttcaactcttgaccctctcagagacaaaaaaaccgggccggaaagcgacagtttctgctacagtagggtgagcaggctgcaaagagatcctattatttcctaagcctctagagaccttgatgcttccagattccttcacatcactcacctacgagctcgtctgtctcatcgtgatttcgggttttaaaagctggatgctatcccgttgtgtaaatgtaccacaccttagccatccactcctctgttgacggacaggcaggtcttttccggtttctggctaatgaggtacagggcagcagcgatcgtttgggcgccctagcgtctctgcccgcgatcttgaggtggatctagctacagctccccgaggagcgtccacacagattcccacagtggctgtatggcttggctcgcccacccgcaaaggctgacgtttcctcttgctccagatcccttgtcagcatgagctgtcatgtgctttattgaccttggctgctctgactgaagatggaatctcggagcagctttcatttgcatttccctacctccccgccttaattcttacacaagcagttaatccgaggtcgtctgtagccctcttgacaacaattcccattgcttgctcccccgacccccatcttatgaaaagagtagctgaggtggccagtccatttttgcttctgttgttctttgtttccgtttctttctatccacctctggtctataaaacccatctcttctgttgagaccatgggaacatggactctaatttatggaaaaataaaggcaagtaagacgtctaactggtaatttcagcctttaacacaggtaagagttggttggccctgagagctggcggaccacttactccctgccattcaggtttccaagtgggacatttagccaagggacactcttgactattcctcttcccttttacattccagccaccggaagcgtgtagaaggaggagctggggggtcttttgggaggcctttgctggtgactggatgactgcagtttattttagggtcaaatatcattaagattcctgtcctcagggcagagcaagacttaatgtatttcaggagtgaattagcttctgcttccctcgcaaccggttctgtatttaggcaggaggaaaaggtatttattgttgatatctttaaacatcccaccaaagtatcaaaccattgatgtaggtcacagcaggtggaactctagaacagtgacaacaagttaaccagagagagttctgaaggagaccttcatttttttcattagcatttagcacatacttaacaggggtattcatgactttgagtctcaaacatctctacaaataatctcaaaggttagtataagatagcatctgcattttgtctctaaattttggaattaccaaagatatccagatttatcaaagctaggttggttactctttcctggagtgataaccatgtgtttccagttacttaaactagggatgtagaacggcaccttcttctgcttgctctgctttcagaacatttccaaaagtatttaacgagtcctgactaatttctaacgacacgatcctttgagttcccagaagtgactcctgttggttgtcctctctggtcccttctcctggtctactctagcctctcattgtactttcctatctgctacactttattgggtcattctctattcttggatccgtatttcacacttatgtcaattttttctttcagaaatagagagacagtggttattgttattcacagaatacagcgggaagaacagaagttcaaaaccatccttggttacacaggaaactcggttatagattgaggctagccagagctatgtgagacctgtctcaacccctctccccaagtctcctaagagaatagaaactcccaaccaaaaccctttttcttggggctggagatgtagggatggatatgtagctcagttggagtgcttcgtctatcattcataaagctctgtgagtttgatctccagctctgcacaaagccagatgtggtaaggcacacctgttgtcccagcaatcagaagacagagacaccagaagttcaaggcaatcttcagatacataacaaggccaaggctagcctaggatttaagaaacctagtctcaaattaaataaaaattaaaaagagagaatgacgttcaacttcttaggattcagagccccataaaccaataacttgctcccaagcatctgtttcaaccaggcagggtgacagtgtagcatcttagaatcttgtttgttagactttctctggacactggccttttctggccccttggaaccatgaacatctggtgacattctgaattttcaagctctttattaatttttctgcaccacttccatcaagccatctctgtagaaatctttattaatgttctccaacatttcttcttcttccattattattattatgatgatgatgatgatgatgtgctggggatggaacccaaggccctctacctcctaggcaaaggtagcaagagctacaccgagctgtgcctctggcttgcctttccttcagtaactacacatatcctgtaatggctgttaagcacatagaattctttttatcagccatgtctgcatattaggatcacctagaagaccttaattaccactttcctcctggaaggagcttggtcatttgatttgaagtggatgctgggatacccttccccacttgcttacctaaaaaagactgagttgaaaatcttcctcagcctcaagctgggatcatcatgaggttaccacagagcaaagcaactggaccaagtgaccttggacagaaactcagggtgtctgagccaaaacagacctttgagctgacttctgtggtttgtttgtttttcctcagagcaatgggtctcttagtgtgctatgttttctgttatttcattgcatggtatttggaacagctctgtaaaaacttatattttatttattgtgtttctgtggggtgtgtgtgtgtgtgtgcatgtgtgtcattgtgcacacgtggaactcagacgacaacttgtgtgagatagtgttcccctttgctgtgcagggactaggaattgaactccggttgtctggcttggtggcaactgccttcatccactaagccatctcggtggcccaagtttggtctatgttgtgattataaaaagataaagagatatgattatgttctatgggggtgtggcgagggatggggggagggggtgcctcagtgggcccatgccaagccatcccttccccctgagggaccagccacatgatggtatagtatagaatagagttattcagggcttggggaggggaattaaaagagtagtagaggcagagaaaggcagagagagtgagagagtagagaagtagaggccagccatgactacatgaagagggggaggggcgggagtgaggagagagggggagcaaggggcaaaaggcaagagtataagattaagggggggggggcaaacagccccttctatagtgggccaggcctacctggctgttgccaggtaactgtgggggtagagtccagacagaatacagcctatgtgtgtgtggtacacacagaaccacaactccacccacccacatttaaaaaatgtcttatgtatttttaaaacttaaactttacacataggaatgttttgcctttgtgtgtgtacaccacattcatgcccagttccagcagagatcaaaagagagtctagaactggggttaaagatggctgtgagccaacatgtaggtgcatggaatggaaccctggtcctctgatgaaacgtgtgcatttaaccactgagccatctctccagctccctagcatggtatcgtgaacacgttccctcacgttgttaacacacatgcatgatctgttctttacgaagtgccaacattttgtgatatggacgtgccacgtctgatgcgcccctcacgggcatgtggtcttcccctcacttctgagcaacgctgctgtagtgtgagtgctggagcagtgagctttcccgctgacatgctctttcatttcccttggctgtgttcccagcaggggagctgctgagtcactcctgactccagcttctgaaggacattcagcctgcctgccttagtctctaccagctacaccactctgtcagtgatgtgggctgctcagtttcttctgctccgccacttgttattgtttctgtttttactcataatgctggattacttcaagccagtaaacaaccgcaaatagaggcccttcttctacctttgcatgctagtgtttggccaaactgtagtacaaaggaggcactcactaaatgaaaacacacaggctctctctctacacacccacacacacccgcacacatggtacacatacacatgtccatattttttgtggtgctgaggattcaacccagggcctcacgctaagcaatcactcaccaagaactataccccagtccccaggatttgtaaatcccagcccttctcatttgtacactgccttcagaatgcagtgaggagctgagagggctcacagtgacctggcaaaaagcagggaatcagaatctcattgcagaccagagaaaagtgagagcaaggaaggccagagattaaggaagaatggaaaccccattcccataatgcccctctctttactgagacaatggtgcttagtaagtcttctaaatgtctcattagttaattaatgttcagaaaagaatgttaagaagtttcaaaatagcttagtttaaaaaatgaaaagtcagcatgctactccctagacactgaagggactaagctccttggtggcttggagcctccaaatcgtagtcccagcagggtcccctgtcacaggggatggggcagacacaaggcaagtcactagatttctaacttcgcaaactaattttcaggctttgaagtagaactggcagacaattaaacacctgggttagacaatgcaggacattttaaagagcaccagaaattaggtaaggcctttaggtaaggactgttgatttttatgtatgccttatctgagaaaccgcagagaaggaggccactggatggtcagctctgcattccaatggaaacacttaccttcctgcagtgggaagtctgaaaacacgcatggaatgccccaacatgccatgtctcaaacttcattcagttcaaaaccatcaacattttgctaatttatgttcctgagttttaattaataattaattaattttcaaaagacaggtttgttcaggttggtcctagagttcttaactcaagacattcttctgttgcctcagcctcctgagtagctgggattttatatctacctattatgtatctgtataattgtgtgtgtgtgtgtgtgtaagcttgttgctactcaaatactatctactttctatgctttgtttgaaacaggatttctaattgcactggaacttgtgaattagggtaagggcctcaggaatccttgccttccttcccatgagggaatgagtgccaccatgcctgccttttggagagtgggaggaatttggcccattgtgcttgtaaggcaaacagtctacctactgggatgtcctcccagctcaaaaactcatttataacgggcatgttcccagcacctgggaggcagatgaagggagagatcaggggtcaaggccatccttggttactggtttatggaattaagaggctaccctgggacacatgagaccctgtttcaattcttctctctgaaaccgtctctgcatgcatccagttaaacctagaactccctaggtaccccaccgatctcgaactccatcttttcctgcctcggactcgagggctgctgtctggctaattactttatctatactgatttaattttgctccctgagacagggcctctcatgtatgtctggctggtgaggaactctctgtcccatcaaagatggcctggagttgttgtttctcctgtctccacttccaaactaatgggattaaagctgtgggcactacatatgacttgacttctaaacaactgcttatttataccaagacactctgcacaaactattgctatacacttaaataagcgcatatgggaaatgaccaaagaaagctaagttagttgacttttatttttatttatttatttatttatttattcatttattcatttagattttttttttggttttttgagatagggtttctctgtatagctctggctgtcctggaactcactttgtagactaggctggcctcgaactcagaaatctgcctgcctctgcctcccgagtgctgggattaaaagcatgggccaccatgcccggcttttttttttttttttttttttttttaattgtcaaccagacacaacctagagtcaccagaaaattaggaacttcaagtaaagaactgcccagatgggcttggctgatggcagctgtgagagaatgacccattggagatggcatgaggacccagcccactgcaggctggagtcagcaccaacaggccaacagggttgttgttgtttcagctctgggcccgacttctctccgtgatagactgtttattacctgcaagtgtaagcctgaaataaactctttcttatccaagctgcttctggtcagagtattttctcacagcaaaaggaccggtgaaattgtcactagggccatgaattcgaaaccgctcttctttccttacccagcgctgaagtgaaccaaagcagcagaggcagttaacacggccacgccagaaccctgggcttgtgaacactagtccacgagccaggacccataccttcctcactgtgtcggggcaccctggcacttcttatgccagcttgagtacaagtcagatttcatcatcactaaccttaagatctcggacaagctagatcttttgagtctgaatttattcagtaaaatagtaataaccatttcgaaaagtaaattagaagcggagtaggcttatagaaaggcacagcaaggtgtcctgtaacatcggttccctttgccacggatcctctgggagcctctcagggctccgtgaaagaaacatgccaggcagcgtattatctgatttcccttacctaatctaagaggacagccaactgcttacacaggtccgccatgccaagcaatgtaggaaaggtcaagaagccgtccgaaatggtagcactctattcatctccccaaatccttgtgtcctaatatcgggtggcctgacggtcttcacggctttaaggtctgcaaaggcaatctgataaaccttgctgttgttccaggtccgactcttggcctgcaggtggaacaatctcccacagcaccctatttggtcctgatgagggcagcatgccaggggaccgcaggcaaagccaggcggctttcaccagatctccaggagcgcaaagcctagggggcgtttccgagcgcgggggcgggcacagccggtaccgcccccgccaccttcagggtggtgcttgggtgctgatcttaaacttcggcaaagtttgcaacgggtctcaagcacgtgcggcttccccgcccggctccgcgttccccgagccgcccccggtcacctgcgcgcggttggtctctgtcgtttccccagcggccgtccccctgcgctctcacgcgacacgcttctcccaggctcgaggaggcggcggcgacagcgcgtagcgggcgccccgaggagccccgagaggcggggtcagggcgggccggcgcttggttcccggaagccgctgcttgcctgcgaggctccggccgaggccggagctcgagcatcctcacccgcgcttcccggagccgccgcccggccgcgcgcaccgcgggcgagatgctgccggtgcacaccgaggtgaaacccaacccgctgcaggacgccaacctctgctcgcgcgtgttcttctggtgagtgccgggtccgggcccgttcctccgtccacgagatgctccgcgtcggcttagccgcgtgtccgatgctcagcgccggtccctgatggtcggaggatgcgtttcctgcacagccttacactccgggctccttgtcgcgcgtgcgccacgcggcctgcggtccccgcccgcaccccacgcccgtgccgctctcctccaggaggggcacgcggggaccggtggcagacgcaggtggcgcccacccgaaaccgtggggatccatgggaggtgcgggggtgccctggagggcgggctctgtatgcccaccttcgctagcttcccatcccggctcagggcttgcacaactccctcacccaaactgcacctctttatttctctttaagcagcagtgaacagatgggcttatcaaaaagcagctgaagttagagttctgggcgaacgccaaactctgttgtccccatggccttctgaaacaccttaccagacatctttcaggtccattgattgcctgtgtgtgtgtgtgtgtgtgtgtgtgtgtgtgtgtaaggaagtttaacttctaggatcccgtctctccttctggcccctctgtgtgtgtcctagtacctaagtatggctgtgagttaaaaggtcactttattacgatgttttatttagttacgaatggggacactactcttgagcaagatcaacatgatgttttcctcttgacagaaacgcagccatagtggagtacattttcccctgttagatggacttttcatttctgcctttgatggccatatccctcttgggaatgagtttcggaagcctgttgggggtcttaccaagatgtgttcagagacaggagtcaaggtttccatgcctaaaaccactgatgggttccctgatctggtctccgccccacccctctttttgtaggaaacaggtgaagaggtttagatagatgacattcctaagtagttttccgcctagtagcctgggctggctagtacacgcttggctaacaagaatagtttttattccttgacctccgccatttcatcttcctcacgttctaatgttacctttttaaaatgtgaaaacctagggagcttcagagtcatttactactgtttttaactgctgatgcagtgtgtgcaggatccgattttggacactcggtcaagaggagcttgcgggaagaaggaatgtggtgaaatgaatttaaaaaaaaaatacataactcagagcgggtgggctgtcttggtctcccgagcttttggcaatacacagacctcctgatgattttcctgtgagcggactttcagaatggaggtgaagcgagagctgggtgtgggtggcacatacctccagtccctgtctcttggaaggctaaggtgggaggatgacttgagcagctatggagctgagaccagctaggataaggtagcaaggcacaatcggctgttgtttgtttgcttgagacagcctcaccctgtagcacaggctggtctggaagtcctcgaatgcacagcaatcttccttacagcctcggtttccacagtgctgggattataggtatgagccaccacatctgtcaatacacggtcttaaactatgtacggaatagctgagtgtggtatcacagcctttaagctgtcaataccagcactgagtaggcagaggcaggtggacccctgagttcgaggccaacctggtctatattgtgttacagtcaggcttatagatagactttaaaataaaaaagggtaattattttacattgctgtctggggtgagtcccatttctacttcccagttggtgagaaattagctattgcctctagtttatcccttgtgagggggctcaagctgaggtactttgactaacccgtctaggatggcaaagctactggcgtccagcaggatccaaacctggctctcaggaaccactgtactttgcagttggtcctcccatgcatgaagaaggattgctcccgttcttacagcagtttctcaaggatgctattacaattcctgtcgttgaagatgcgtgtgaagcatctttggtcactatggtatcagctctcacagcaggatagtcagaagggcagcatcagcatcacctgggagcttatgggaagatgcaggatctccagtgtccctgcagactgacccagcacagccagaagcatgggggtccatgcttttcacaggggcccgagtgatgctgacgaaggctgaggctggcccactggactatggcgcacctcctgttagccttggctttccagtgttacactttgcaggagggctgtgacttggtgaagtcacccgtggcctgcttaaccagtgtgtcatttctctttctctcttgcagctgccttgctgcagatgggaaaccctcctgcaagcccggattttttttaccttctttgtggggcgtttgtttttccgcccactctgtgtctgttttctagactcttgagttggtagctgcccagccagatgatgacagcccatgcaataagccttcctaggatttaggtgaaattgtaatacagtttggacgtgggctgtcaatcagcctaggacaccggctggtattgtggctgtctcttgcacgcatgtgttctttcagtgcacacgttggcaggagcacacggacattaagtaaaactgtaacctgtcatggatcctttagctgatatggtggactttacactgttgcctttaagacatgatatttttctgagtgtaattttccaggccttttgctgttgctgaacacagtgcattcaacagttacatagtatgtgtccatggccgtatcttttggtgtcctctcttccctttctcaggctgttggtgttggggattggaataaggcactgtatagattaaacatgcacgctaccactgcctatacctccagcctcatccagagctctctttctctctacctcccaggatcatctagattccctgtgcatattttttttagctattgtgttaatgacaaaggatgctagggtttcttttttgcagctgctgtaaaataggcaccagttttgttttgtttttttgttttctttttctttttcttttttagatttatttatttattatatgtaagtacactgtagctgtcttcagacacttcagaagagggagtcagatcttgttacagatggttgtgagccaccatgtggttgctgggatttgaactccagaccttcggaagagcagtcgggtgctcttacccactgaaccatctcaccagcccttgttttctttttcaacacagcacattttcctaccactgtttattgagcagtttgtcatacccgtcattagaaacaaatggtataacttgtgaaatactgtgtccagccaggtcgtggctgactgctcctctttagttctagtaaccctggagttagaggcaggtggatctctgtgagtttgaggccagcctggtctacagagagagctccaggacagccagggctattacacagagaaaacctgtctggaaaaaaaacaaacgaatgaatgaatggaatactgtgtctagccggctatgagaatgtccaagccccagtctctcccaagggtgtccttctccctgctgccccctggtgttttcaccaacgtccaggaagacctgtgggtgtcctctgtattcctaggccaggcctcctcctacccaggaggtcttgggattgcagcagcagatggaaggtaaccagagaggcgctttcccagggtgccagtgtcaagggactccaggggactgatgcatctggccccagagagtagttaagcccttgttctcctatagctgactgtgtctctgctcagagatgtcgtgctgcaaagccatgtgacaggacagactctctggggactgggctgagaacaagcttgtgacttgcagatgaaatgcagatggcttaggaaggttggctgaggggcactccatcacggcacagaagtgccacgtatttatttattcattttattctgtgagacaggatcattttttagcccaagctttgggtagagaactctcccagctcactgtcttgagtgctaggattataggtgtgagccatatcttgcttggtagtgtttaattttaaccagaggcattttggtaccatattttgagtatttttattatcacacttgcacactcccccaccacactcatacattacacacatatgtataaacacacacatgcagaaatacacatacacatgagcacacaaacatacacacatgagtataaaaacactcatacacccatgagcatacactcacaataccacacatatgcacatgcacacacatatattnnnnnnnnnnnnnnnnnnnnnnnnnnnnnnnnnnnnnnncacacatatatttgccccccccccgccgcgcccccatgcacagacaacattcccttttacatacaacacaggtacacatatacatggacacatactatacacatgcataactcaacccacaacctataacacacacacacacacacacacacacacacacacacatgcacacactcctactatggcacctgtgtggaagtcagaggaaatctctctgtctgcttagtgagtctggggttgaacctcaaggaagtcatcagacttggtggcaagcacctttatctgctgagccatctcatggccttgctggtattaggcagagtgccaggtttctggaatgaacaaacaaacaaacaaacaaacaaaaaaaccctcctgcccgccagagtagaaaggaaagttttagactcacttaaagattagccttttaaagacatcttcatattgcgtaacacaagaagaccactggatgcagaagtcatcagagtgggagtttcatgcctggatagtaaatgtcatatttacctgcctcagtaatagtccttggacatggttttgaaagtgtaggccatgggtctcttgtagcgtccccgctgtgagtcctcaggaactctggccctagtgagtctgggtgggtcctggggatctcttttgctggctactgcttctaatatcctcggaggacaccttgagaggccgtgttgggaccttgagctttaacaatggtgatcactagcacatatacattttgttccattcagcttgttatcttccagaagtttaaccctcagtctctcaggcagacattatcacccttctttaggggaggcagattgaggtccggtccggagggggttgggaaatgcctcagtaacctcgtagcttggaggtgggtgtgtcacagctgagacgctatctggatcatcaaaacatgtcataggtgtgccccatcgaaaacagaggcactcgctcagtatctgtctacctgctgggctctgctgggctggtagaaacgttggctggctggatgaatgtgtgtgtgtgtgtgtgtgtgtgtgtgtgtgtgtgtgtgtgtgtgtgtctgctgacttgatcaagcaggcctcttggttgttagtgaatgagtttgtttttcacatgtgtgttcgtcttcagcatgttttctcctgtgctggcttgttttatgtcaacctgactgacacatgttgtagtcatcagagacgagggagtcccagtagagaaaacgcctccattaaggtcaggctgtgggctaggctatagggcattttcttcattagtgatgggcaggggagagcccagcccattgtgggtgctgctatccctaggctgatggtcctgggttctataggaaagcagactgagcaagccagtaagcagcatttccccccatggcctctgcatcagcttctgcctccaggttcctgccctgtgtgagttcctgtcctgacttcttcagtgccgaacagtgatgtggaagcataaactaaacacaccccttcctctccaaattgcttttggtttcatgtttcatcacagcagtagaaaccctgactaggacacctcccgtccatctgtaaggttgaattgctatttggttgttagcaccatcgtctgtctagttattaaggcataaactctccggtcatccttgtttaaaccattacccctggcatcagattctacggttggactttaggcatgcctgtggagccgtttcatccaccgattcattcacacgctcaccaaatgttgttgaggatcctcagagacactcctcaagcctggctgtggctttagttttttctttttaaaaattagatggaaggaaaatcactgtagaacaaactggggtcatcctgctcaaaaacctccccggcctcctcccgttgctctcaagaacaaaccataattcacattcagttctgtgactccagatggggctgtgacccacagttcagctgtggcttagagcaggctctgccagtcactttctgcagagggtacacggtgcgtccttcaggctctgctgcgtgcggtctctcttgcagcgaaggactcgtcttatttgtacgtgtcatcctcttatttttgatcattgagccgggaggtctgctgccagatttatttcaggacccaacaggaagaggttccagggtgtctccgagggcaggatggagatgctgccgagtgaggtggtgaagccccgagaggaacggtcagagcgcatggttaacagaatgtgcagatccgtggaacagttcactggctgctcagtctacagggtttgtcctcacataatatcctgcttcatctctgtttttgttcgtggcattgatatcagagctgagcagcttgttgctgccattcaaaggttttagttggaggactgactagaaaggaacaggtttggagaatgtcccccaaggtgtggcaagccacttgccagcactgtatgggagattacattttctacgagtgtcagaagagaccacatcacctgccccgtgggagtccagaggtatcgggtctccgggttggtcattccctatgaggaaagtggttggcgtgttggcaggatttactttgtacaaatagaggctggttgttggtgttgggttgcagatcctcagattgtttccgtctgttgtctactgatgggaattatttcttcttctctaggtttttgagatagggtcttatctgcccaggctggccttgagctaccttgtggtattaccgaggtctactacgcccagcgggtggaaattatttctctgaaggctaccagcctgttgctacatttcctttaacgttttggtggcagtgggattgaaccgagggcttcacataagctaatgacacgctctgtaccaaactgcagctccagccccccattaagttctttctagttgacactggcagcccgctctgaggctgaactgcctgggtagccaaaacaaccataacaaaaggaaactgaagaaaaacccaaggctagcacatccctaggccagtttgaatcctaattttgggaagcatcacttaggcgtaaaataattttaaaaggctccttcagtttttgatggacagcgaaagccaagaaccacaggctacagcctcccctgagtcagtgagcttctctgagtcaccctcaccccccattccatctcagctccctctctcccaggacttgcccacctcaaggtgtgggggctgtggctgcgcagagcttagccctgtgttgctcagcaggtggcagtggggggcagcagtccctgtcccaggggtcttggggatggtgggctatttgatccttataggaacattttgtggagaatggctcttccgcacagtgaggaaagggaggctggagagaccaggaaacatccggtgggcaagatgaagctgggagctgagtcggggtactaaccggagagcatgcaccggaatctgtgtttctgtgatcatctccttagcctgttttcctgtttctacgtgatggtggcagtaaatggatagagaccaaagttagagggaccttggtggagaggaagtgccagctatgcaaaaatatatacattttcctatgtaaaacgagcataaaattgctcgtggaatacattgctcttagtctgtaggtctgtatggagtgtcagttagtcaggatgtgagtgggatccaactggccagccctgttaatgtcgcctcttcaaggactcttcaccagccagcccgtgtgcacaaggctgtatgcaaggcgtgcatcctgtttgacttttgtgtgttaaaagatttgttttttattattattatttttgtttgtgtgtttttggttttgcttttgcttttttgagacagggtttctctgtgtagctgtggctgtcctgggactcactgtgaagaccaggccggaatcaaactcagagattcacttgcctctacctccggagttctgggattaaaggtgtgtaccaccaacaccctgcatttttttctttttaaaattatttgtacttaggtgcttctgtgaatagatatatgcacttgtgtgcaggtgcctgggaagccaggggtgtggattcctgctgggcccctcaattcctgtcctctgtgagagcagcacagactccccactgctgggccatctctcctgccctggtttttgtttgtttgtttgtttgtatattagaattcaagtgagggggctggagagatggctcggcgattaagagcactgactgctcttccaaaggtcctgagttcaaatcccagataccacatggtggcttacaaccatccgtaataaggtctgacgccctcttctgctgtgtctgaagacagctacagagtacttagaattaataataaataaatctaaagaaaaaaattcaagtgatatctatttatttacttatttatttattttcattcattcattcaatcattcattcattttcactagtgggtctctgagcacagccctgcctatcccggaagtcactcactgtggagatcagactgaccttgaattcactggacctgcctacctttgtgtacacctccggcccagctctttgtcccgttttgaataacagaagggagccggtttcctgtttaagctggtaggcttggcctctagactccaagtgtatttggaggcgctctgttgctcatcgacattccgggttttccatggtaagaccgaccctgccatcctaacaggtgccagcctggtaaagtacgtgcaggtgcgtgggaaggattgcagcaaaattaacttcctcttccgctttgatgtggtgctgtgatttgaacccagggccttgtgcattctagacaagccctccaccactgacctagattctcagtcaagaggtggcaatggaccaacccatctgtcacaaccaggcccctcctgcattcagacaacacggaggcttgcttgccaggtggcaggtggcattgtatgaatcctcttaactgcctcaggtgacggagccttttttggaatctttgtgacttaccaagaaaatacctcctatttagagatgaactctctgggttcagagacgggtgttccctcgttcacctctcagtacgcagttgagccacttacctatcttgtgctgtatcggcaatcgcaaaggattattttagttttaatctgggctgcttggatttagaatggctgctacctgtccgtaggagcgaggagctcgatggtgtcatatgccaaacccgagctaggagacacagagttctcccagacaattacgggaccacgctggaagactctcgtggaagactctttgtgagatatctaaccttcactgtcaacttgactggattttaagttaccaagatcggggagacccctctggttgtgtctctgggggcaggcattcccagacgtgtggttaccttccgtgtggtatcgctatccgtgggcttgggagaggtaacagagagagaaggaaaaccagtctagagctggcatcatggcaacccaacacctaccccattccgggctggccgtaaagtgagccggtctccaccatttgacttctgctggacagcttggacagcttcctgcttcctcaagctgagttgcacctggcacctggcaaccacgcctcccttttgtctgaatgcaggaatagctcgtagtcccagtagtcccatcgccacctcttgattgcagctgttccctgagtgatccatcttccccttcacacctcaggccttatctttactcagtcagccttgctgtttctgctgcccgccttgaggcttctgataccgtctccattgagatttgatgtgctcagtggcatgagccccaggtagcatgtcctgtctgatccctgtagctcctaggagtggctgtgaggtttcccagtcactcccaacctttgctgaccattccttcagtgcacaggctctgtgtccagggcatgcggctgaagatgcccacgccctgtcttactcagtcttgtggacccgctgagtcgggggctgcgtttggggaagctgctgtctgtttccttttccttgcgtagagctcgctattggtaggagctgtttaactaacccttttctttcagtcccttctccccctcctttagctatttatttgttgagtttctacttctattttttaaatcaacatagacaataagtgtcattagtcatattcacccatccatacctctctctgtgcctccttgtccccgccttgtctctgttccttgctgtcccatttcctcgttaccctccccagacctttccctccatctcatagtcctctttctgggtttgggcctctgctcacgctctatcctacacgtgcacatatagaaacatgtaaagctgggatctgcattcatgtgtgcgttacagttggcatcacatgtcaacctgactcacctggaaggagggactctcaagtgaggaattgctctcatctggttggccaggaggcatgcctgtgggacatttcctttacagtagttgagggcatgggggcccagcccactgtgggtggtacagtccctaggcagttgggcctgggttgtaataagaaagggaactgagcaaacctgtaagtagtgttcctccagtgttgccctaggacactcttgtcttgatgtccctccatgctggattctaacctgtacgccgaatcaaatcttttctcccctaagttgcttttggtcatagtatttagttaaagtaacagaagcaaactaaagcaatgtatttttctttctgggtctgggatacctaaataaaatatagtcagacccatccatcttcccgaaaagttcatgatttactttgtctttatagctggatgaaatcccactgtccaggggaacaacattttaggtaggggttatgtaagcgtcttctaaatattaacatagtaacctctaccaccagcctttggagtggtgaatactgctcttttccagggtgaagcagactgtgagcaacagagtccgctcagcccagcctcctctgctgaagtgcatcgtggtgtccaggtttacccttaccccagctcacgaacccaaagggaatactgagttgtagcagagcgagtgagccacctgtggcgccagcagggtctgagctggctcacctctttcataatagtgtccattaccccaaagccaagtcagaggttaatgtttacaacgctggagatgttaagacctttgtccggggtcacagccaaactgcagcagagcaagacccaactcccccagacctggagatcttgaagttaatctaatctactgcttgtctgcatgagatgtggatagacactggacacttgctggcctgatagaggaaaagtggacacaaacacctgaaagcttgctcttggtgaaagatgtccgagggagggtgaccaggagtagtgggtgggttctcttaagactcagcctggaaaaggactcagatcatggagagaatgtagccacttagcggggctgtgaagaagccgcttgtcctcaagatcagagcattttgaaattaagggaggggggatcggagcgtctctttcagagttgagcacaccaatgtcggtctgtgccgtggtcccatgtaactagggctattggacctggaggtataggctcctcagtgatggttctcagagaacttctgacacaggaaaagtgggcagatgctgaggctgtaaggctggtgggggagctgggctctggatgtggggccccagactgtggtcagtctcccaggagattgctgcacacccgaaagttgaggagccgcagaaggcagggccttgagagctttgatcccgttctgaaggtttcacagaagcaaagcaggtgtggggcatgcttacaattccagcatctggaggcagaagatttttgtctcaaaacaaaacaatacccaaacaaaaacaatcactaaaacaaaacaaacaacaacaacaacaacagatccccacatggtgtctatgacccaccatggagagagagaactgactccctgaggttgctactttgacctccactcccaccacataagatttattttaaatgaatacatgttttttaaaaaagagagaannnnnnnnnnnnnnnnnnnncccccccccccccgcttctcctcttaactaaaaatggctgcccttgtggctgtaatgagggcctccaactgagtcacggcctgcttcaatgacctcacagctgggcattaaataagcacttggtagaatcatgggcgagcgcgcgcgcgcgcgcacacacacacacacacacacacacacacactttgcaaaatgccacataattaattattttccttattttcctctctgctgcacagcacttcctttatgcacatgctaacaggtgaaacttccaaaggcttagactctcacacctgtggcacactgataatctctcctctagccactataaagcaacaaaaccgccagtcacagtcgagacctatttaactgatttagggaccatgatggaccatagccacaccaagcagacccctctgctgtgagaaggtaccactgaggacccctggtcacctgtcttcccgtcttagatccttcctcctccatagacctggctccgtctcccttgctgcttgttattctgtaggacaggggactcccagaacccattaagttgaatgcctagccccctagtattgtagactgtgattgtactttgagataagatctctaaaataggtaattaagagtgaattgtctgattgtgataaactttttaattcaaggttagtgtccagatttcctctttgtatttgtggacactccataccgtggacatttatttggatgccgggaatcagagaggatcacgtcaagacgctgggttggggtgggagtgcgggggtggtggcggtggtgggggccacacctaacaggaagtagaggcctcagaagaaaccagctcagatgccaccttcatcttgcttttccagcttctgcaactgggagggagtaattctctcttcgtttgcagccacttggactgtagttcacagtagccagggcagatgaatggaatccacatgcctcccagaagccacggatacatgaagtgtcccgttgtccttagctggggccgttgttctgacctgtcccctgtctgctgagcttgcctgagattctccctctgtctcggcagctctcaccacacagcttctccctttcccttcagagttcacgagtcaggttctgctgtaattccagaacgtcttccgacgtggaaccgactcccagccacccttcagaacgctgttgttgattaaactgaagaaggaaagctctgtctctggacaagcagtctcagtgttctaagcaaattatagcttttgaacctgggtcactgttattgttggtcctggtcccccggcgcctgtggggtgtgtcgtgtgtctttgcaggaggctgtccggtgtgtatgcttttttgtgttcttccaggctatgaaccaacatgggctcatactctgcagtttctcttcaacatgcaaatgctccagactggtttgctttggggaaaaccccagtcaagtccttgggggatccgatattagcagtgacgaaagaaagagagagagagagagagagagagatggctccattgtgctctttggctgcccccaaatcctctgtcctgtgctcctttaagtatatagcacagcactgtttttccggaaagtgtttgtaaagggaagattagtcccttgggttaaggcagaacagggtctctcgtcttccctctctcgggtggatggctggccacttctgctgccaactgtcccctagtaagatgaaggcttttgaagggaaattccaccaagcagccccatcatctctgctccttgggagggattcctcacttgggaggaggagtttcattttctaagagtcccttccaggaaggataaggtgcagccggacaggatttcccacagagctggtagcttaggggcatgggagagggagttagtggcctttgatttctgggaattgacttcttttaagggcaaacctcggtgcttaagtgtcagctagcaccgaacattgtcaggatgcgggaaaggccggcagccatgatggttttttgatggtcccttcaaaccttgactggccaactttagatgaccctgaagccattgtgagtccctgtggaaggctgccagatgcaactcttttagggtctccagcaaagcacgcagtgtgcatttcatttcctctctctcgggtccggagatccatttcctggtaagcatttcaagggaagagaaagctgaacttgaatgaaaattttaaggattccagtagcaagtgtcgtgcctgcagtgtccttcctgaggagtaatttggagtcttaggcaagaagcagcctggccctgtgtgtcccgtagctccccaggaactggcattggcagtgggcaagtgttagttagcccagacttcctccctgggccttacttccgtaggccttctctgacacaggcgtctcccgtctctgtactcgaggcttttttttttttttctttcttccttcctcccttcaggctgtcgagatggctcagaggttaagagcactgaccgcttctgctgaaggtcctgagttcaattcccagcgaccacatggtgactcacaacaaccagtaatgagatctgacgcccacttctggtgtgtcagaagacagctacaatgtacttaagtatagtaataaataaatctctgggccagagcgagcggggactgagcaagcagagttgaccagagagagcagaggtcctaaattcaatccccaacaaccaaatgaaggctcacaaccatctatacagctacagtgtactcatatacctaaaacaaagaaacaaagaaacaaatcttttttccttccttcacacccagcaaattgacccgtgttccaacatccacaaaaacccgtgcccagtgaggctgtctgggctgtaggttgtgggtcaccttttctccaaaggcagaggtgtcttaccccgcaagagtggcttctgagatctgtaagggatgcagaccttgcaggcagctttcctaagggaagggagagtgccatccgtaacctggttagtggcttgccaccggcagcagtcttctgtctccagctgaggacactgtgcactgtggcacggagggtgaggtgctaccagccgcaacctgaacaaaagggacgggcggggtgcccagttcccggctgcagcagctccaagtccaaggctgggagagagatgtgcttatgatgggcttcatgcacagtcggtacggtcagagaacagcttcctgtgggatgtggtggtttactgtgcacaagttgtgcttgcctgccccaggtccccccaaagtgcagtttctgaagcatgcataccacactgcacaaacagccaaactcagtttctcacccgctgccagattccttagagatctggcgtctgttttgatggtagggggaagggtcagtgctttctgtaccagagtctcctgtgggtttgtgttcttatgtgatgcttatgctgtgtgtgtgtgtgtgtgtgtgtgtgtgttaggaattatacctacagactcccgaatgctggcagacaccctaccatggagccacaccccaaccattactcctctttttaaaaggaagtggtcacttcgacaggctctctctccttgctccttccccacaaaggaggaagacaaccctgccctgatttaccatgaaatccaaggatcatgggaatggatggttatctgagatgagagctaacctccctccctcnnnnnnnnnnnnnnnnnnnnnnnnnnnnnnnnnnnnnnnnnnnnnnnnnnnnnnnnnnnnnnnnnnnnnnnnnnnnnnnnnnnnnnnnnnnnnnnnnnnnnnnnnnnnnnnnnnnnnnnnnnnnnnnnnnnnnnnnnnnnnnnnnnnnnnnnnnnnnnnnnnnnnnnnnnnnnnnnnnnnnnnnnnnnnnnnnnnnnnnnnnnnnnnnnnnnnnnnnnnnnnnnnnnnnnnnnnnnnnnnnnnnnnnnnnnnnnnnnnnnnnnnnnnnnnnnnnnnnnnnnnnnnnnnnnnnnnnnnnnnnnnnnnnnnnnnnnnnnnnnnnnnnnnnnnnnnnnnnnnnnnnnnnnnnnnnnnnnnnnnnnnnnnnnnnnnnnnnnnnnnnnnnnnnnnnnnnnnnnnnnnnnnnnnnnnnnnnnnnnnnnnnnnnnnnnnnnnnnnnnnnnnnnnnnnnnnnnnnnnnnnnnnnnnnnnnnnnnnnnnnnnnnnnnnnnnnnnnnnnnnnnnnnnnnnnnnnnnnnnnnnnnnnnnnnnnnnnnnnnnnnnnnnnnnnnnnnnnnnnnnnnnnnnnnnnnnnnnnnnnnnnnnnnnnnnnnnnnnnnnnnnnnnnnnnnnnnnnnnnnnnnnnnnnnnnnnnnnnnnnnnnnnnnnnnnnnnnnnnnnnnnnnnnnnnnnnnnnnnnnnnnnnnnnnnnnnnnnnnnnnnnnnnnnnnnnnnnnnnnnnnnnnnnnnnnnnnnnnnnnnntgggggtggtggtggggtgacaggtacctaagacatccatgtgtagtcctgtctcctggagccagggggtgggggtggggtggggcctgggggtgaaagggggtgagtttagccagtgattagaagtgagcagctggctttagaggctagaggccgggcaagcatagtgctcagacaaactcaggggaactgccaagtatccaggtttcaaagacaccctgagaggccgggaggcctctgggacctcaggtctctgtgttcttagttagctgaaccacctggctgttctgttggggtgacatgtttggtgccaacacttgcctatgtcctgcggtgggcagtgtgagacactggacctgggagactcctgaagccttggggtctgctcagggggcagagtcgggcagtgaattccgatgttaggagtaagtttgtgttcaaaaaagaaggagaccacactccagtgcaagtgtccagacaaggccagctgtccttttgatcaagagagtgttccctggagggcaaacaaagacagacaataagtgtatttagatttattgtaaggcaggttgtgactgccatttccccttggctggggtccaacctcacagctgggtagtctgaaaaacctgcacacaggtaatgaacgaaggggagggaggcacactgctccaaagagagcctttgtgcaaataagggctttagtgtgtatgtgtgcgcgcgcgtgtgtgtgtgtgtgtgtgtgtgtgtgtgtgtgtgtgtgtaaaacatttgcataaaagtcttaaccaggcaggagagataaaatgacttgaatctcgtgtcctaaacacagttctatagcatttgacagaagagactcttacttggtattttcttccctttggtgtgtgggaactccgtgtctgagggcctggggttcggggtgagtttgctctagttgagcagtccttccttcttggtcatgttctctttgagttaggatcttgttttgttgttgttgcctttaaatgtgtatgggtattttgtctacatgtatgtctgtgcaccacgtgtggtatgtatgtgcattgcctgtagaagccagaaggggacattagatcccctggaactggaggtgtagccctgtgtgaattgccatgtgtgtgctgggaatcacagcctagtcacctctctacccaccatcaagtagtatttttttaattaataattttatttatttacattctaggtgttgctccccttcccggtactctgtcccatagtgcttcatccctcccccgcctccgcctcctttgtctctgagaggtgcatcccccttcctggggcctcaagtctctataggattaggcacatcctctcccactgaggtcagaaaatgtctgcatccctctcagtcagctgctggttagggccctggaatcttctctcagcatcctgttcatcctgtagcctggatgaaggacgagggaagtcatggttgatgtttcccgattccccttgcttctcccagctctgctctctcccatccttgggacaacttaatgctctctacccaacacactcagcacacgtgggttggtaaggacgtcccgggaatgcagtggactgcagggcttctgctctccgtgctgcctttgattgggacacgctggcccccaacttctcatttaaggagccctgcctcttgctgtctaagctatctccccaccccaccaccttgtggctccctgttggttcactgtgtagaacctgtccttctgagcctggctctcttcagtatcctggaatgtgagttgcatagagaccataatctgtggtctagaactcttggaaagagccttttgcatagtacatgcttaaggcgtcaattccaatgaattgttatgatttcagcttcctggagccttgccttcagattcctggagaaggactgagatgcaggactacttgctatcatgtgctgtggctgtggggtggctgagggccctaaccctaggggtcaggagtaagtgcccctctgactttggccaacttgaagggacacagcggaggtgatactgtactgtctcttgtgggttaggaatgtcttccacagttcttgtcccaggctggtggggggctgcgtctgtggtgtcctcctcctctttccagtaaggcacaggcacgctggaccagaagcctggctagagttccctctgggttagcttggagatggtattcagaaagctgggtttggtggtgggatggtggggactaggcaatcaatccagcctgcggatgacagcccaagcatgaatcaaggtctccttcactccattgcttctgtctgacataccctgtttgcaagggtctcctttactccattgcttctgcctggcataccctgtttgcaaggtcgccttcactccattgcttctgtctggcaggccatgtgtgagtcaaagtctccttcactccattgcttctgtctggcagaccctgtttgtgtcctccttagttgctttagtttttccaactctgtgcacagttgtggctccgtggaatattttacagtgaaattggagaagggcatcgtcaccgttgttgttgttgttaatttaaggaaagccatttcagaaaatgccccgaagttcattgtagagtttttcctcttctctttattttttaccacataaaccctttagtagatggccgagggagactggtcaaagggtttttttgttctccgaatctgtggctattctggatgagggttgtatgtttgtaactgccctgatgcttcaaagcgtgaactggctcgcctggaattttcctcagttctgcctcactgacacagggctgcccaccagaaaagcctgtggtttgtaattctcccctttagaaatgcgaggctgtaagtgggttctcagggttatcatagagtaacctgtccagagcctgtattttgaagtacagttatttcaggttgtcagagcattggtaacaaagctcattccaggtctggagtcctggccacaaattttccacagtgcctaggccagagaggtagtgtacttggctataggaaagtgcaggtaatctgcatggagaatgggtgtcatgttctaagctagcataaggacggttggaggttggagtttgggtcggcgcctttagtttgttgtagagcaggtgtgggcctggcagactctgcctcctgcttccagagcttaagcaagctcatttgtgccacatagaaaatgaccagaatcaaaactcagatcggcgcttatctatttagccatctgtctcttcaaatgcagggtggtattgtaaacgttaaatgaaaacttaggcgcaactacattaacagcaatttttcatacttacagttaatccatagcacacagaactaagtactcttcttccctaggctttattccactttccaaaaaaataattctgaattatagggtggcctaggctgggggccaaagtctctgagtcaaaaatgctctcgtggggccggagacattaaaaatctaaaaggggagtctggaggaatgcagagggtctgcatgtcatgcacaaacaagactctgagcttgagtccccaacactgcatggagaaccagttgtgctcctttatgtgacagacactctcacttcccagttgctgtgacatgacacaacgtgcaaagccaatgaccgaagcaacttgcagaggaggagagaatttgtttgtggttcctgcttgtggttccatggtggggaacatggcggcaggcagaccatccctgtggctgtagctgagagcttgcatcttgatccacagctgtcttagtcaggctttctattctggcacaaaaatcatgaccaagaagcaagtttgggaggaaagggtttatttcgcttacacttctatactgctgttcatcaccgaagaagtcaggactggaactcaagcaggtcaggaagcaggagctgatgcagaggccatagagagatgttctttactggctttcttctcctggcttgctcagcctgctctcttatagaaccaagaccaccagcccagagatggtcccaccagcccagagatggtcccaccctttcccccttgatcactaattgagaaaatgtcttacagttgaacctcatggaggcatttcctcaactgaagctcctttctctgtgataactccagctgtgtcaagttgacacaaaaaaatgaccccttgtcaacttgacaaacaaacacatcactggtaagcctcaacccttagtttcttattcattcccaagatctaaataacttaaaaagtcccacagtctttacaaattcttctcttaactgtgggcttcactaaaaaaacttccttcaagagggaaaaatattagggcacagtcacaatcaaaagctaaaatcagtctccaaccatccaatgtctgggatccaactcaaccatcttctgggctcctccaagggcttgggtcacttctccagccatgccctttgtagcacacacatcgtcctctaggctgcagatgcctgtaatccactgctgctgctcttggtggtcatctcatggttctggcatctccaaaacactgaatgacctcttcagtcctgggccatcaattgcaactgaggctgcaccttcaccaatggccttccatggcctctcacagtgccgagcctcagctgctctgcgtgacccctttgtgccttcaaaaccagtaccacctgggtaactcttacacattattaagtccatccacagcacaaggtacaaccttggctatctctggaacacagcctctgtgctctcagaaaacacttctcagaagatgtcacctcaatgatgctggtctcttcttaatcaccgctaatttcttagctccagctaaccagcatcaatagtcccagtaatgcaaaggttttactttagtagttctggtactacttgttaatcatagctgattcttcagcaccagataaccagaaccacagaatcttcacaatccaaaatagcaatggccctgaaaatagtctttaattttccctctgaaatttcacaagccaggcctccatttttctgcactgttctcaacattatcttccaagctcctacacaacatctcacagagttcttaacagcgaatggatcttctggcccaaagttccaaagtccttccacagtcctccccaaaacatggtcaggtttcacaggaataccccacttctggtaccaatttgtcttagtcagggtttctattcctgcacaaatatcatgaccaagaagcaaattgaggaggaaagggtttattctgcttacacttccatactgctgttcatcaccaaggaagtcaggactggaactcaagcaggtcaggaagcaggagctgatgcagaagccatggagggatgtcctttactggcttgcctcccctggcttgctcagcctgctcttttatagaaccaagactaccagcccagagatagtcccacccacaaggggcctttcccccttgatcactaattgagaaaatgccttacagttggatctcatggaggcatttcctcaactgaagctcctttctctgtgataactccagctgtgtcgacttgacacaaaactagccagtacaacagctctgaggcagagagactaaatgggactggcatgggctttagaaacctcaaaatccattcctagcggcacacatcctcacccttctttaatagatccattaaccggagaccagttattcaaaagtatgagctgataggggcatcctcacacatagcatcacgtacatgagcctctcctgacctggagatacgagaaggtaaagtcaactctctcacgggcttagaggcacagtgcagagccacctgagtgacaccagtgtgatcaggagacggaaagggagggatgtagattatgcctgtggcagaatttctgggtcaggacagaaagggaggtggagcaggttaggattggtgagctgtattcttgtaagctatggggagagccccgtttgcctagcatctggctctgggacgattcacagagggatgctgctttggggtgggcaggccgtgttgaatcagggcagtagtctggttctgcgccttgtgggtttgtagctatccaaggcacgttcctgttggatattcaccgtctccaagagctggctagctccactgtggtcggcctctccccagctggagaaggatttaagatactagaacatcagcatgtgtagaagacagaaataatgagtggaataatgttcttgctgcataaggattggcagggcagcctgatggcctgggcagaggagaaagttgcttgggcagaaatgtggagcaggcatctctgggttcagctggaactaggaggaaggtgaggggagcccatgatgcctagtcagggctcacctctaactctcccatgcacttgaagaaagttcaccaaaaggctcacggccttcctttgtgtagggctttgatggcacagccgtgaggctgcccaagggcctaaactcataactggatggaagcaggggccagggacattatctggagccccgccctcccccaagctaagttcactgtgctgccattgcaggaagcctgtgacgtcaccccagacagagctgtcacaaaagggaaaggcccagacttactgtatggactgccggtttagagactttgctaaagatttggcttccttttgtggagatgccaagtaactctggacctggctttgcatacggtgctttttggattcggagaaaaatcagttgccatagatacatacttttgtatgcttttataacgaaatgtctttttcactcctgtgttacttgaagacattaacttagtagggtttcaaggtatgtgtgtgtgtgtgtgtgtgtgtgtgtgtgtgtgtgagagagagagagagagagagattaagagggagtttgtggttttaagtagcaagaatttaggttgcctaggcacatggtttcttttatgctagaagctttggaaaacaaaactgtcagaaatgattagtcccctcatggagtttgtagctcatgaaaagcggggaggactgggttagatttcgtgctggttctggaacttgtggtcacttaaacacagaatatgcaggaaagtacctccgcatctcaggcctgtggaagttttttttggggggggggcacgatagaggtgggggggtgagacaggatttctttttgtagctctggttgcctagaacttacagagatcctgttgagtggtgggattaaaagtgtgtgccaaggggcctggccagtgagagttgtccataagacaccacagcagaatagattacattgcttgggaaagttgtagatagatttttatctttgaataatagactattgcaaatgcgtcatacccaaagtggtggctgttcagcaaatggcctgagacctttcctgcaaggagttacttcatatacttgagacatgcttgcatgcatttgctaatttagatgtttcatggatgcagttgatggatgcagttggtaggtagaggcatacaagcagtgttctcgggtgagaggaaaaacctcgatagaggtcggcctcgtttttcaagctatcatggaaggccttgaaaacttcggctcccttcttccagttgcgtgtgctgtcttgttccgtgatgtccctctgcttctgttagaaccaatgcctgctgtatacataggaacataaacttgagtaaaccagatggttccagttcaaagcagagcttctcaaggtatttatgagagccattacaagtcattgtctccttactgataaatttgggtaatcagggtaatattaataaacacagactgctcatctgctgagggctaaaggaatgcaaatagttttgaggatttgtaggctaaaaatctcttacaatgagctgtggtctggaagaataagcaacctttatatagtgggagtgggtgggtggtatgcagggatgggtgggggggctataagagccaacagccaatactgcatctgctttcttgtgccccccacctttcaggccagtatctcagtgctgtggccttggtggcctttggtgatttgtttacagccgggtgtgtgactcagggtggtagacgctgttttagagagagctcagccaatccctatcagattgcacatgagatctgcccgcagctgtctccagatttatttgcttgcttctcttcaaccacagacacacgctaacctcagcctaggtctcgagaagcggaggtgactggtcctttctggtcgggtccttcctccccctgtattttttgtttattctctggtgaaacagacccagaggaactttggtggtgcctctgcctcgagactccctgcttcggatgtggctcatagacccagagaatggctgctccctgcgtcctgggagaagtgtggactctccagctccttcaatagtgcgccgacccagagccatccatgaggtctctggggaacggaagtgccggggactggggggagaaagaacccagacccactaccattgttgtctgtctagataaagctggtcggtgccttattctgaggacaggaagaggaagggtagaggtgtgctcatgagatggatttctaagtcttctttgcctggagatctcacctagcagcaagtgtgctcagaagacgttgggtggttagtccagaaatcaggagatagaaaaggcggcttcaggtgcttagctgagctcagtggaggctgtggcttgcctatacgtctatcttagatcacaatgctaactgaaagatggaaggcatatagccatctcttgatgagtgacatacagtaatagatgtgttaccacaaatgacaccaggattagcacttgggttactggcctcatagaaagcccaaggcttattgcatgcctaatgtgaagaccatacaaatgtggattttctcccaatcttcccttctccttcatgtcttcttttttggccgtggaaatgacaagtatgtatgcagtagagtgaacagaacagtctaaccaagtcccaagcagcctcctctgagcttcagccatgatcagctcccagccaatctcatctgctctctaccccactctcttccccactcggagactcgtacacttgtgtgttcttggttgcaagcacgtttccttgcttttgatttgtaaagggacgctagaaccttgatttgttaaagttgttatgcgcttgccgtaatctcacgagtattctaggggatgcttaattatgaccgtataggcactgttaaatcaaccgtgaacaccacgccgtctgtcttgtcactttctgtgtgtctgtatgagtttgtgggtgcacatctgtgcatgtgagtgtatgagcaggccagatgttgacgttaggtgtcttcctcaatccctatccaccttagtttttgagatagtgtctctcactgaacctggaacaaacaacaaattcagctggagagcagtccagccatcctcagggtttctttcgcctctgtctcctcagcaatgggattattggtacgtgatgctgtgtatgatgtgtgtgtgtgtgtgtgtgtgtgtgtgtgtgtgtggtcagaggacaactgggaggagttgtgcgtccctccaccacgtgagtccaagggattaaatccggttgtcaggcttgctggcaggtgtctttgcttgccgagccatcttgctggcacaggttggaccatctatgactaaccacacacctccgtgcggctttctcacctgtacaacctgccgttctctgagtcttgatctcagacccacagactggaagcccagcaacagggatctggctttacagctcgtgggctgcacagatgttttcttgtagcttaaaattcaaggtctgaatgttagagagtgtagcagcaaaggaggagggagatttcaaaccatgccttttctttctggtgctggcagcagaagtgctgagggggcagtgatggctggtgggcactgtgctgagccctgcagtctcatattggactgaggtgcatatggtgaagccctgatggaagaagccatccgagtggagatgctgacatcttcactgtcagaaggccatcagtgtcttgagaagttagtgggaagtcaagagttcccagagttgatcagaacttcacagggtcccgactcagactgcttcaagcctgtaagattggggttcctaggacactcacttctgacacagtgaatataaattcaggacctcctatgacccgcttgggcttaatagcaatgtctcacaggactcaggaaagtgctatacacagaactatgatttttctacagcatgtacatactggttgaaatcagtcaggatcccaaaagcacagctttctggtcctatcccatgagctgggatttgccactttctggacatgctaatggctggcacattgtcttataatgatacccagagtgttggcaaccgagaaagctcataaaagcctcacctgttgggcttgctttctgcaggtggcattgatgtgcgtgggtcatgagatccatctcagactttctgccctctaagccccagagtctaggcaaagtccatgcctgtcaatacatgattcgtccatccggggcagtttccatcgttggttttatgtagtataaactttccaggggacctaatgtgagtcaccttgttagcataaaccatcagaccctgtgacctgggaaattcccaagacttagaaaagctagggtcaaagtccagccaaagtcaccattgcatgagtcccctccctcccaccactgctatctagatccttctacacagcaccccccccccaccagtcctctccactgacttggagagcattctagagtcaggttgggaaagctagggacacaatcctgaacagccacagagttcaggaggcaaatgctggttcagagcccctggccaaagggttgatgctccatctcctggtggaagaaggcactctggctatacaagcacgacttgtagctcaatctcccactgtctggatgagcacctgcagcgtatcacacatgagctgcatggccctgggcaaaccaccttccgtgtgccactttccctctttatggatatatgaacaatagcgttcaatcaagtttcctgtagctgtcctatgaagtgacaacacagttgatggtttaagaccatagagattctacacagttctgaagaccaggggtctacagtcggggcataggcaggcctagctccctctggagacaccacaggagaattttcctgactgagtacctacagcttctggcactggtgattgttggcttgtgactgcagccttcagcctcttcagacagccatattgtagtagtgagttgggctacacctctttggctcccggcagatcgtatgcatgcacgcatgcatgcatgcacccgcccaggacctatccaggtttttcaagtggaagacacacatatatgccagttaattttaaaatgccttggctacctcaaaggctgggcactccttctcctgctaccccatgcccaattggggaagtagccagcggcactttattcttatatggctcattggttttatctcttgtggctcttacctccatccatatcccacaacttcatggtgatctctcctcccctccccctccttccccccatggcatcttagccctcacaactctaagggtctcgccctgtttccctcttcccagccactggctgttgacatctttattgtttgatcaaaaacatatcagagacaaggacctttagtgtttggacgcacagatcccctattaaatcaaaacaccagaaacaatctccaacagccagctgagcccctccccccaccatcgatagcatttacaccgtgcctggtatttttgtgaacaacacctacattccccatgaatccagtaatggaggggcttgctggagagccaagtcagaggtcagggggtcctgaaggagctggaactgaatcagccattcaaggaaaaagagctacctacactcagcgtgcatggctggtgggtgtgcaaaaccattgcttggaggataggtctagcgttttcttgaaaaggggaacatactcttacatgacatagcaggcactggtattttaaccaaatgagcttaaaaccctgcacataggcaattatagcagctttattcatgatggccaaatgtgggaacaaccaggatgcttagctggtgaatggatacacaactgctagattcagagtaggatccagtgataaagaaacactccacaaaaggcccggggctacgcattttgaatacatgctgctaagagagcaagtcagttggaaaaggggagatcctacaggagctgactctgatgttctgggtacagtcaaacaaagatgagtggttgctcagggtagggagtaaaggggtgaaaagtccaaacacagacttggggctgtgaaaataatctcgtgactctgccgtggtggatacacatcattaggcggttgtccgagcttaagagtctacagcattctgaagtcagctgtggaggcttcgagacacacacacacacacacacacacacacacacacacacacacacactcacacgtcaacactggccacctgtggtaggagacagactgctctggaggtggtgagttttaagagtgggcaagtctgtgtctgtacggggtggggggagggttagggacatacggacatgttctagttttgctcgggtctgctgtgaacccccaaagcactctaaacccaaaactgtcacgaaaattttaacaaaagaaaaaaagggcagaagcctactgggtggggatgaagccaggcatatcaaggcatgttattggcacaagttggccaccagattggctgtgaggtggggatgttgctgtgactagaaaagccggtttgggccactgcaaatatacatcacttcagttaacctgaacacatgcatgtttgtttatttcccatgaagtgatacacgggaggcgatactgagcctgcagtagggatcagatgtgaactccatgtttgcatacttgtgacccactcttccagcccacataaagctcttctctggtacttcttggtgcccaaaccccagtgaagggcattagatgctcacatccctcatttcctccctccctccnnnnnnnnnnnnnnnnnnnnnnnnnnnnnnnnnnnnnnnnnnnnnnnnnnnnnnnnnnnnnnnnnnnnnnnnnnnnccctccctccctccctccctctccacgtccctctttgagcttgggagcaagagccaagtcacaccttatgcaggatcaggtttgatcatttgggagaaagtgattcaaacaggcagtgctagccagcttctcagggttggtatagcatgcttggcaggtcacaaaagttctaggtgacaatctagtctcacacttcctcgcagggggcctcagaggagctaataagagtagggtaccgcctgcttctcggaagatcctctgtttggtagtttgaagggacctggctctcttgtcccatcccaactatgtgactcctgctgtcagaatgggattataagtgtgattctttttttcacttggtgaagtgcttttttgaaggagagggggacatgtgtttgtctgtccctttacagtgctgttcttggagctggttatttgggaagaggtgatggtgaggtaggggaggcagagaagctgtgaacagcgtggattctctcttgggaggaaagggaagctagctaggagcgcctgctggcctgaggccctggtgaggacatgtctttaccctgttctttctgtctctcttggctcctgtgaagtgagcgtctttgggtaccacacactcctaccacgacatcctgtctcacaacaggccaaaatcaatggagccaacaaccatgtacaatagcatctgagtagcatgtagcatgtagcatgtagcatgtgagaacccataggaagcaggatgtggaggatgcagggactgggacgtcaggtaggagggaaacggagcctgcttattttaatacacaccaggcaggaggccttttgggaatgtgatacctttgagctttgcttcgtttgcttgagacgggctagtcctaggctgaacttgaactagctatgtctaagatgaccttgaattcctgctaccttccatgtgctgggatcacgggcatggcccaccttagcagtttttgttttgagaatgttttgggaaagatggcagcttggtagatgtctcatgtatgtgtttaatgtggtttgggcatggacccagagtccaggaaggccaagtgctgacccaccctgagatcgcccagtcacacttgtgcccacactggtgatcatactgacacctgtgctgagggagcgctgaacgacagcagggcagggagagccaggcaagctggcggcagttgggtgtgctaggctctccgagccaggccactgggaactttgtggtgagggaggccctggggaagttgggagattttgtttgatttttctgttgcttactggatgggcatgaggtcagagccaaccgactggcatgccagaggagaagccgatgttggcggtttgccccacctcttccctggcaacatttaatcaccgaccaactaggaaacaaacttctgcctgtcagttcctcatttcaccttagtgctgtttccaggctgggaagcgcttttggccctacgaaacctccaccatttagactcatttattatgcatgtctgtcacccacaactgttctatcctgtactgctgactgataatgggttttgagtggaaataaatcaaaaccaaggacttgcagagagcatgttcattcacgtattgggcaaatctgtgtgtgtgcccaccatgttctaggcttgggacttgcttacacgctgtggagaaaacactgtcttaaaatggtgatgtacaatagcctaggagaggctgactcggaggtgagtcggagtggctgctttgcaggtccaagtgacaggtgtctgcagatagacagtcttgaggagataattgggatggctctcaggggtttctaacccgggcagctggaaacatgtgacctcagtttaccaagagataagaagggaggtgaggccatgtgaagggcagggtttcaagggacagaaagcaatcgattggggcattttaaaattcaaggttcttgtccagtgcactggaggaacaacgtgtgggacaagcaactgcttgtatgagtcaggtgtcttacttacttctatataaagttaggtctattgcgagatattatacatcagtattctgagaacttctgttagcggtgctttgagaggtaaagtttgattcgcttctgttaataaaaccttgtttggacccaaatgacactagtgtttcgctcactaaggggacatagttctctttctgtgcacctgaaacttcccacggtgccacttcagaggaacgctgaaagggaaaggcaggctgcatgctaagcccttccacttggggggacatagagaacacaggaagcttcctcagacatcgcccccctggaaacacaggaactggggatccagtgaggaacaaccagccactgggttccattaggaactgaggtcagggctcagggtttagagctgcgcacattcctgttactgtaacaaatgcctgcagacagccacctactgagagaaaggggccacatcagaccacaggtgtggaggtttcatttcctgactgcggttctggctctgggactgcagctctggtgcagctcctctctgcagaggagagagagggtgctggagaacagggctcaggtttctgacaattcctgtgtgctcccagtaacccggctgcccctgcccccttacagcctaggccctgactggggattaggtcattacggggtagttacgatccaaaggacagttgtagatcatttttagagacgagatcaatgatcgttctgagcttttttttcctttctgctttgttgtttccagatgggtaagattctggctggggtgtgaagtctccattgttcgatgtatctgcaatcccttaggtcattatagtgtgtgtttgtgtgtgtgcactcgatgtgtgtgtgtgtgcgcgtgtgcatgcgaatgtgtgtgtagctgcagtgaaagtataacgtaaaaacaaaattctaggcctttaggcccaggcttgagaatgtgacctctgtgactcaatgctccaaggtatgctaatcataaaacagatagtgccattccttcacccacctgcttcctgggttcaaagagtgttcattcaaagaaagtcaccctggccattgccagaacccgctatgcaaatgtgctattgttaggggctcttagaaactgtcttgagagataacctgcacaattaccaggtattccttgagactcttgtgactttgcacttccttgggactcttaactggtatctttggtattttccaatgacgccctccctacttccttgagttgtggtttctttctttaaataccaccttacccagctacttggggcgccacggtcctctacccctgcatggtgtatgactgtgggcccgagagtgctcttgaataaaaaaaaatcctcttgcagtttgcagcaagaccgtttcttgtgtgtgatttggggtgtcacctctcctgagtcagaacgtgggggagtcctcacgttgtgggtctttcagcagcatgtgtgtagagggcactttgtgtctatgtgggttctggggctcaaattaaattgttagggttccagtgcttttattgttgaagctgtgtccttggtctagaaatcaatcaatcaatcaatcaaccaaccaaccaatttctctctctttctgtctgtctgtctgtctgtctgtctgtctgtctcagatatgaaactagccttcagagacttgggcattctcctttacgtgggctgcagtgggagtttaacatcttaggtgtcgtcacccctcttccccatgtccattcttgtttaacttgtggctctgagcattctgtcattagcggtgtgaacacagacacacttcccacttatgcagtggctaggacatcaccgggactcagggtcagggacacagacaatcttccctcccagagctgctctttttttaatgtttatttccagggtgtggggccttttctttataatagattgtaattgttaggtttggcttctgaaagaagtatgaaatatcagactggttcaccagagaaagcgaaagagcagtgctgactgaacaactatcaggtgtgcacagccattccaaccctaacgcactgagccacacatcaatagctatcaagtaatgaaataatattttagtttcatcatacttagatgcaaaacaggaaggtgagggaaagaaaggtggagatggcttccaggatacgaaggagggagaacggaggggatttactatctcgtcggggaggttagtgtttgtctcttctacctgcatgcatggtaaatgtgaagttcatggacactgagtgtttgcatctgggtgatggagacaggatcacgaactgttccctaggacaccgaacttctgagttggcaatccttccctctctagcacactgagaaagcaggtttcagaatctctcaaatttttaggaaaagcaacagcagcagcagcaacaacaacgctagattaaagatccatccccttcagtgaacccttcatgggagagacaaccacccaccccccagcccccagacggctcctgtccctctgagctgatggatggctgcctgtgtttggcctgcagcaaggtgaagcacacttcaggctgcgtctcagaaagatgtggccatctcccttatacaagatctcgtccgttcagcagctgtggattgcacgcctgtcccaccaagcactgtgcttggtagcagaggttgtgcgttgcgtgggggtagtcactgctctgaaggagttacaggcaaggacaaagtgaaagctatagcaagagagaagggaatgctgagagctctggaatcaagagttggctcaatctgacagtgacctggggatgttgactaaaccctctcagagataaatcctctcagaatgaacgcacagtttgaccatgtataatcacctactgcttaactacagagtattctgagagattgtcaccaggaagttttgtcactcagaatcttgtgcacacaaatcaagatggccagtggtaccacttggcgttttatatcttagggattaccatattaccagttattgtccaccagaatgtccttatgttgcacatgaccacatatgacttaatgcatagatgatcaaagatagcttcttatcctagtgtgctttgcttgacagcaaattaaaccatgtgtctcagcctggggctttttgagatttgggtagtgagagagcctgggagaagcaatctgtggtatcttatgaaaaaaagtttgagttgagcgtgtgttgagttcatatattgaatttaacactactccctctttataatgttgctacatacgatgcaaatgcagttaactgtgcggtctcattggacagggttaccagtgctttcctacgtcatggggcttgggtcttgagtttgaactcaggacctgtatatgctaagcacttgtttggctacttttctatatacacccaaggccctttcttaactattatatttcttccccaagctgattttacctgctgattgaaaacaaagctcaccacaaaccatattaagcctttgtaagcctaaaaaatgctaataaattccacttagaagtaccggatggaaaatacccgatgttctactggaagagagggctcaggcgtgtaggtagtgtctcagacatgtctgggagcccacctacattgatccaaggcttgcaaggtgacaaatgtcctgaaaactcttggggagggtgctaagagagaggtgagctggttggttcctcagtgatcaactcactgatccctcagaatctactgggtggacgaggcaggggcattggcacctcttgggacccccaaatttactttggaagtccttgtaatgtctgctatggtcttggggagctgtcatagctctgagccaaaaagtctgtgcctttggagtgtcctgagcaagttgcgtggaggttgactgaacaccttgctccctggagctgctgggtgctctcctctacagaaacccctgagcagcagcttctccaaggggagagcttcccagagtatgcagtcccctgtaaagtgtgcactctcaagagagacaagaggaaagacatctgcttaattcagtaatctcatctatcaaggctttctagaaggacccacatttaattgcccaagagagacacatgtatattccctggccttctgaagctttcgcacaaaagatgatagattgttcctgtgagtgggggtgggggtgctgggtgggtcggtgggtgggggacagacaggagagggctgagcttccatggacagtggctgacatttgtcatcccagaggatctgcagcatctttagatgtccttccatttgcccaaggctgagagagagagagagagacagacagacagacagagaaggagacagagagagacagagaccactcactggttagcagtcatatatccagaaagcagccacatctatgtagacattaaagctggagggttccacagcacatttaggcttctcactagagagtgcttttcagggtactgtcaccagccagctctattgcaaaggccccgagtttagaaaaattgttaataaaaggaccaagcaggtttctgtacctggtcagtggtaaatctctctctctctctctctctctctctctctctctctctctctctcacacacacacacacatgtatacatatatatatatatatatatatatatatatatatatatatatatatatgtatacatgtgtgtctatatactaggggtagatagttgacacctagagatatgtagtgataggtcacaggttctgactgagctggtagaagtagagagggggtgacagaggctggtattaagaaatcaagatatggtgtcttgatgtcagggtgctctcattgactgcctcccagtgtgcagaacgagagtgggggagggaggagccggttgtatgaacgagcacagacttaacctttctctgtctctttgtccatttaaaatacggagggtgacaaaacgcgctgaggcgagagtctacttagatgcaaacgtgggggtctgagtgtgttatcaatccctttaactttgacaggtggctcaacccgctgtttaaaactggtcataagcggagactggaagaagatgacatgttctcagtgcttccagaagatcgctcaaagcacctcggagaggagcttcaacggtaagcagggggcggcgggaggaggtgaagcctgagtgtgcatgcgcagggtggccccttgctcgcagggtggcttggaggaggtctgacctcttcccacgtcccttgctctgtctggagctttaatgtccccacgttgcacgcctcccttcaggttgtcctgtcttggtctgacttagtgacttggggaaagaaaacctgggttggggctctataggtcttgatggctgagatctgtccctggggctggtctcaccagagcagtaacctgccctctctggctgccagggctgttgtaatccagcagagctcggcagtgacctgtccccggagatgtctccccttgaggtctctctttctggtgcaacagagtctgcctcacacatctttctgggtccctcgggacgagccagtgtttgtatagcatctgcggggtagccctgtcataaacacttacctgtccttctgcccttccgttttactcaacggcagtcctactgttcctgactccgcgtttgtctcactgcaggtactgggataaagaacttctgcgagccaagaaggactcgaggaagccctccttaacaaaggcaatcataaagtgttactggaagtcttacctgattttgggaatttttacgttaattgaggtaaatgttagtcatatcctgactgctgtctctgagtgggtttaccaggaggaggcgtggagtcctgacggtcgatcattgttggagtgagtggggaccagcaggcagaatgagctttgaaaatgtcttgggttcagggaggaagcgtggtgatgctcattatcacatctttggaatgggtgatgctttggtgactgaagctgaagacattgccgtttcttctaattaaagcgcagtgctatctcgcagctgttaagatcgcttactgctgttgcagacatctggagttcagtccccagcgcctacagggtggctcacagcccttcctgaggtccagttcacggagagtctccgccatcctctgacctgcatgggctccagcctatacgcagtacacacagattgcaggtacacacacacacacacacacacacacacacacactacatacatcttaacaaatgtttgaagtccagtctcacaggaagctgacagcacctctgagtgctggtgttcggtgtgtaaattcaccttgtcctctttgatgctcatgaggaaatacatttggatcagagcccagaataaccagtgcccaataagtaattgttaactgaaccatgccagatctgataaatgccttcctgggagagtattgtcaactttcccttcccaggtaaacaagacatggtgtcatgtgcccgggcttgctgtggggccctggagtctctcaccctcctgctgaccgatcgttggctgggcactgagagctgaatctactctggccatggaccagcttcaactctcgtgacctcctgtaccattcatcctgggttcttgctgcggagcagattgctggtctgacgttgagttctggtggtatggacttagagagagctacagcgctcattccctgataaaccaaagctggaaggccatgagtccttgcagggtcacccgttagtcagatagtcggctgcccagtgggcagtgcctgtgctggtcaatggtctgctggaggggatcctggaagcctggctgtgtggcttgtccttctggtggcgtctttaagagaaaaatgttatttgtatatttatttacgtatgcgtgtgtttataccacatatatcaggatgtctaaggaggctgggagaggaggtctgagccattagaactggagtcacaaggcgggtgtgaatttcctgacagggatgctgggatctgaactcgggtcctctggaagagcagcaagccctcttcatcactggtaccctataatgggcttaagagtgttggaggtctcacaagtggctggacatcctatctatggaagttgcagctctgtggaagggtggtctctgatgcagtgaggtgaaagctgtcccaggtgtctttgatggggtgaggcaggtggctatccaagcaggagagtgcgctcttgctgagcacgccctgtgcatgttgaaaggcacagagttctgttctatggcctcggagaaaggtaatggaagtgcttggttccagagatcgaccttctggaggttgcaaaggtgccaccatccttgttccggacatgagtgctctctttgagagggcagtgcccactgcttgggtgctgtttgtagcttggagaaaggtaaccttgtgatgcagaccacatgctgccccatgttctcttctcccccagggtagtcaggcccactgtgcacctgggtggcctagacggagggaagcgtagtcaggcgggtgggtgcaggcaagaccttggtcggcagtgcactggccaagaacacacatggagacagggttggataattggttcagttgattgggggagcaagttgttttgttttatataaagataaggagagaaggaatgtgtttggtggaggtgtagtcannnnnnnnnnnnnnnnnnnnnnnnnnnnnnnnnnnnnnnnnnnnnnnnnnnnnnnnnnnnnnnnnnnnnnnnnnnnnnnnnnnnnnnnnnnnnnnnnnnnnnnnnnnnnnnnnnnnggaccagccacatgatggtatagtatagaatagagtttatctagggcatggggagagaggggttgggagggtagtagagacagagaaagggagagagagagagagagagagagagagagaggaagagagagaggaagagagagagagaggaagagagaggaagagaggaaaagaagaggtagaggccggccatgggcatgtggagagagggggaggggaatggggagaggggaagcaggaacaagagacagagcaggagcaagagagcaagagagagaggaggggcaagcagccccttttatagtgagtcaggtacacctggctgttgccaggtaactgtggggtggagcttagacaaaattctaacacaagggctatttaaacctttggggtttaagtaggagctgtctgtcctgttgagtgtccatctctagctgggacctgggtattggggatgcctcatttgcataaggaggcattccaggtgctgctggacatgaccttataaagggaaaggaagtttaaccccggccttgtggcctcctcaggtgaggcaaagcggggacccaggactgtgtgcactggggcatgcaggccccaggtgggggtggggatcctactcctgttcatttcaggataagatttaggggtttggacacacctcagccctactcttgctcggggtttgtccccccacccccatcccacggttccctggccccacgagtgggggtaacctgagggtgggagagagtgcaccctcaggctcctagcccggttttcggtttgctttacttgtgttgagcgtcacggggatggtattttttacatggctgcagaaagtctgagtttaaaatgaatagcacagtgagctgctgtctctgtagccgccttgcagagtttcccggtcaaatgcgctgcacaaccatggctagtggaattcctctaggaagctccggagtctcaatatgtgcttgggggcacaaaacagacatctgctaagtgccacagggaccaggggcttcagggtggcttcacataggtgtgccatttcttggcgcatccatctgcccccttgttctgtagtttacagctgtaatcaggcactttacattctgaaagcatcatggtcttgaagcaccctgagtctgggtctgtccctggcttgtggttgtccgtggtgtcagaggctgccctccctttagttggagtcctgagccccagatgtttacccagctgacgtgtcacagtgagtgtgggtcccgcttagtaggtcagctacagaggtgcaggcagcagcagctgggcgagagaggacagctatgctgaagtgatgtcagttttgtcccatagtgatcacctttggagccgggaagggcaggaaggcaggaagtcctgcgacagcacagtccgtggaaccctggctactcttttaggaacctgcttattgaaaagtcatggcagaagagtagagaagggggttcctggggaacccggacattctccccaggactagtggcagcgacagtgacagtaatactacttatcagcaggaccagcagtgttcatactctgaagctgtagtactctttggtgttactatcagtagcaatcaatactcctactgtgctggctagttttttattaacttggcacagcgggcctcgtctgaaagtagggaccctcaattgagaattcctccataagttctgtccattgggcattttcttagttagtgattaatgtgggagggcccagagcattgtgggggctcccatccctgggccggtagccctgagttttgtaagaatgcaggtggaggaagccagaaaagcaagccagtgaggaacacccctccatggtctctgcagcagctcctgcctctaggttccttccctgttggacttcctgtccttacttccttcagtgctggagtaaggatgtcgaagtgtgagccgcataaaccctttcctcctcgagttgcttttggttttttatggcagcaatggtcaccctgactaggacaatggagtgcttcccagtagtggtagtagtagtgatagcagtattactaggacccatgctcaatgcggtgtaggtagtttggtagtaatagaaagctctgaaccacgtgtccgccctttatccaagatgctacttttatcccagtttttaggaactgggtgaggtaggaggtattcttagtatcagtcagtccctcactacgagcttgtcagtttctcgtgctcagggccaccccagaaataaatgaaagagctgagtttctgtttcaggcgctctgagatgagcccaggccttctaggctggggctgatctaactaaggtcaaaaactttgcccttagcatcccaagtggctgctgtttgatcttagcctagggataatggtgcagagatggcctcggggcagtggtggcacatgagtttgtcaactaggatgcggtccaggttacagtgtctcctggggtcacaaagtcatatgcagtacaggaaagtggctgtgactggtgaatcagtgtgtcagtgcggtgtgtccagctggacacccatcaccacctgtggttgtctcacatacctgttcagcaccccctgttactgcactcagcgactggagtggactggtgtgatctgggatggcagtgcgattaggagaccctgatgccccgggcagaggctgacagctctgtttttttaatgagcccagggtcacagagtatgtgccatttgctgggacccagatcaactgctactgagggcagctcatttgctctggcttctgacgctccgtcctgttggcctgccgggtcagtccaggcattagggattaggatgatgggtatggtagtgcagtgtgggagctggtgtgggcaggctttccctgtcagacctcttcccttgccctgcctttagatcaggtctttgttggtttatgatctaatactgggcatggatgcttcgttcccttgatggacccggtgaccagtcctggaggtcacagtgacattgtgtctctaccatgacgactagcagaccttctaatgcactgaaatctggggagctaagagtcatttgtgttcggataggaaaacctttctttcttcctactccctgccagcaaaaggaagcgggctttctaatacaaatactttcattttcatggactggttggcctattgacgctgctgatttggagaagtcagagataattttatatggggtagctagcagtgatccagtcacgtttcaaaatccacgccccgatggatagggtgggtgtggtggcaaatgcctgttactcaattagctgggaggttgagcaagaggaagagagagttgcaggtcagcctgggctactgagtgaagcctgtctctgaaagccaagacaccacgtttggatgatgtttaaggttacacctgttatacgtgctcctttatgcatggctgtgatcccgttcctgacaaacgcaaacgaaggcagaagtgcttactccggcttggtagtaccgctcacagtctgagggagcacatatctcatcacggatggtgagcgcgttggctagaacaggagacagttggtcatattgcgccatagtcagaaagcagattgaagaacccagctctctgctcattgctgtcttcacatgcttgcccagaagtttgtctcctgggtaattctgtatcccgtcgggttgtcagtcactattaaccctcacaggttgtgtgagccacatggggtgagctgttagattaacagctggttttacgaggcgatttctcatttagtgatctcggctccgtgttgttccgctggacttttgagttttagagagcggaaggatgaacggagtgtggcatcttgtctctctggtgcctcaatagcacaaggaattattctaggaagacagcacagctgtgtgagccacccaccccagccgggccttccctaggtgctaacggagctctgccagagaaaaggtggcgaggaactggtgcagaagccttgcgtgggatttctaggtggtgctccatgttcttctgtgaagctgaggactgtggagaaaccagcatgatcgtgactttggaacacacccgtgcaggtcagagaaagccagctcggagcatcgagttccccgtaatctgtcccttgtgtgcacctcctaggaagtgccatggggacagagatgactcaccatctggagccttactgtaaagggagagtctgcacagcctgcctcctcacgtcattcaggcctggattttgagttatgaggtgtcttgcctgtgggagagtgaagttgggggcatcaaaggagcctcaggggactctcctgcatgtggagccagtcgtgggcaaggcacggcatggttgtttaagtcttttttttttaatatatatatttatttattgattatacgttaactacactgtagctgtcttcagacaccccagaagagggcatctgatctcattatggatggttgtgagccaccatgtggttgctaggatttgaactcagaacctttggaaaagcagtcagtgctcttaaccgctgagccagttttccagctgtttaagtctatatatatatatatgtttatagtctatatagtctgccagcttcatctgtgaagttggcctttggccaagactgtttgtttgtttgtttttgtttgtttgttttaagacaaggtgtctctatgtaactctggctgtcctggaactcactcttgagaacagactggccttgaactcagggatctgcctgcctctgcctcctgagtgttcggcccactgcctgaggacttttctctttttagggtttacttttattatatttgcatgagtgtttcgtctgtctgcctgtctgtctgtgtaccacatgcatgtagtacccatggaagccagaagagagctttggaccttctggagatggtgttggagactgttgctaacatggtcaaggctttccccctgactgtcgctcgtctgggtggatactggagtataggggatcctggaggctgccatctgaggtaaccctgcccttatccaaggtcagaggtcagcagtcagttctgcctgtgcctttgcttggggttgattcctgagatgtgtccagggatgcatttcctggctctttttttccaagtggctccaactttcagctcaacctaggaggccattgatagagaccaagagggagatgacccaggcagggagaggtggaccacgccttgggaagcaggtgtggtcagctgtgtgtgccccgtgggttcctggacactctgacactagcttatttagtgttgacagtgatgactctgagtgagaacccagagaaaatgcttttaaacactttctttaaaaagtcagaggatccattgcttcactggagaaaggttgtattcataatggtaggagattgagaccagccattaagacactatcctcaaatggggttctccaggcaatgcccaggaaactctgctttcataaattaacatctcttgacaatccttgtgttctgctaagactgtctgcaagcagtgggatttgaaagccatttgtgaaagctgatgtcttagccactaattacagtgtttcctcaggcctttgaattcagcttaatttttgaacattttgtgcagaggattgaacacatagctttgagtgtgccaggctctccctctggcactgaggcagcctctctcacacctccaggggaggcagatgacctcggctgcaggtggtcggctcagaaggggttttaactctcctgtgcccactcctcggagggacagcgggaggagggaacttgcttgtctttactctgtttgatttcttgctcagctgcttgctgtcagggccaagggtcatgggacattttcttttttaggcttttaggaacattccaaagccacacgaccagaatcagaaggccctgcttgtctctaagccacgcacctgtaacttatcagctcacattgagacttgagtcacccagggccctgcttgctccgttttgaagccgttcccacatatcacgcctgttatctaagaacagttcaatttgtacctttaagagctgagctttccctgtggagtgtcagcaccgttgcctgcagacgcattaactcaagtctgtgcagacagcgtgtctagccatagctcatttccctctcttagggttttgacctatattttattgattcttttgaataccactctgttgccaactagggcttttgggctcaagtgttctttctgcctcagcatcttaggtagttgggagtacagggcaggcatcagtgtacctgacattcattcattcattcattcattcattcatttgatgtatcttttcttgtgactatgtttataggtatacacgtgagtgtgggtgtgtgtccaatgtgtacagtgtcagcagatgtcagaagagggcgtaacgaggtacagatggttgtgaacctccctacctggctgctggaacttgagctcagacccttggcacgggcctcatgcactcttagctgccagcccaattcccaaacaccgtttttcctagactgtggactggtccagtgaggtgcatctcgttgacaaagatggctttggattctttttatttcccggtctgcccctcactctgcagttacgtttactgtctcgctgtttttgaaattgagagcactgatttgcttgtttagcggaggttcccgtcgcctgggttggcccagtggcattgccctcctgagtcattgaacatgttccctgccaccaggagttgtagataagaagtaaagtgactctccagaccctgcagtatgacttaatctgcaatgctgtgtactatcactactgtgtgctaccattactgcaaggggcctagcatgtgctaccatcattacaagggagctagcatgtgctaccatcactgtaagggacctactgtgtgctaccatcactgcaagggacctactgtgtgctaccatcactgcaagggacctactgtgtgctaccatcactgcaagggacctactgtgtgctaccatcactgcaagggatctactgtgtgctaccatcactgcaaaggacctagcatgtgcttgttgtttccatgtgtgtgatgctaggagatgttcatgatgaaggggggctggctacatcatggtgacgtggcaattatcttattagctcgaatcttctcataattggcatgtctgccctggatagcctttaggttaccccggggtacaggatgtatagaaaaagcaagggaatttcttactacttttctcctaaaactagttttcaaattgggagtggttctttttttttttttttttttttggtttttcaagacagggtttctctgtatagtcccggctgtcctggaactcactttgtagaccaggctggcctcgaactcagagatccacctgcctctgcctcccgagtgctgggattaaaggcgtgtgccaccaccgcccggctgcgagtggttctttaacgttctccactgaggccgatgagctttttgttggctcagataagaggtcatttttgaagaaggctgctgttcttgttttctgtgctgcatccctattcccctttaagagatgatcgtgttaaagccttttaaatagtgtgtctgtgtgtttgtgtacgtgtgtacaggtgagcgcgctcaggtcagagaaagtttttgtgagtcagtgtgctcctccctccatgggttccaggagtcacactcaggtcaccatgcttgcaaggcaagcccttttttacccagtgagacatctcaatggctagaggtcacttgagcagctagttatgaatcatcttttcctttaatgagcacagtgctttcctgaacgttgactttcccccgctgggctgagctgcagtgcttttgctttgtggttttggaacctctgggttcctgtgtgctcttgtttgatgcacgccgtctggaagcattcctcactgaaaccaaccatggtctcgaaatttccacacagcatgtccagcatcatccgtctcatccagggacggggcggggtagacagtagtgatgctcgcccgtggctggtttctgctttcaggaacctcctatgctagggacgcgcaggccccacactccctgtcactggaatctgtgattagtggcttatgcgtgtccacctgctttgtggtctcacggcgaatcgaccatgcatctcggagatcttggtctgacactttccccagacccgctgtactcccattgtctctgatctttctccactaaagcttcgtttcctgttccctcctttaagtctgccgcccactcccttctcccacaggttcattgttttctatgtttgggtttcactacagcatgattttctctgacagcttctttgttttcctttttatgacaaagatcagggactgtgaaattggacaggaagaatctcaggtcccaaaggaacatgaaagaggccccaggccctgtggggacaatgtcccatcaagccctgtgtagtaagttactctgcaaagcagagcggtttgcccaagtgccaagtgatgcatgcaggctgatgaccaaatgcgccattgagaaatagctgccttcaggggctcagaggcccacacagcggtgtccaaacctgggcctcgtaccccacgtagctccgaataactatgcctgagccccaacacaaaattgtaaacttagttaaaacttttttaacttcttttttcctgtgtatgtaattcttttttctttataaatggggtggggagtctgggagacgggattgtgtggttctaaccaaattctgtaggtgacagtgtggacctggactcttagcactttcatgagaattcagctgaacgttttggtgacaaagggcaggaagctttttgggtagggcacagaatggaatgtaagataaaggtaggacttcctttgagacagccttttctgtgtcgttcaggttagctccaaactcttatcttcctgcctccacctccaagttctggggttataggcttgtatcaatacgtggagaaagttcagtacattttcattgtcccttccccaggtcccaggaagcttaattctgttcagttagaagtttgacaagcatttttgtagttgcttcattgtttcttcctaggtgagggttgggattagacctctctaatcctccagctcattggaggagggtaaggcattggctaacaccgacccatcaagagcccataaacttaaggggattgttagaaggcacaacccagctgggacagacacacagatgattctgcaaaggagacctgcctctagtggctacctcttttcctgtatttaccaagccttctgttgttttctctgacactctcatggtccacgattcacacccagtcaggagaattgtgcagcagacgacaactgcaggcctgcatttggagtctcaggcaaagtggaaagagttacccctgggctcctggtgaagggtccaggctagcgtgctctggcccaagctgtcctggcccaggtttctgtgtgaacagcatggcctccctgactctcaggcttctgtcttagtgagctctatccagccactgtgatcacggtgtcaggcactcttgtgtgactcttgtgtgactcctctgtgcgtcctgatttggtgacaggtgtgaaaaggagcctgagaccctggggtctgatgaccttgtgaccttcactgtaactcttccattgaagtagaatgtctttctgtatagttaatagatccttctgtgacttctttggaaggctgtgtgtgtgtgtgtgtgtgtgtgtgtgtgtactcgtggactcgcacatgtatgtgtaatacagattgtgatatttggtgtgatatttgtgactgaggcatctcctgtaaatgtcctgattggggcccagttggttaggatgacccgttagctttctgtttctgttattcctcttctctctctccgtgctaggtctgggttaggctcctcacttcgtaaggatagaaaatggccgtgaaaagcaggcttctcggctgtctgcctgtctgtgttgctgggaaggaaaaggtgttcaaagttaagtgtttgaaaggtttccaagcccggctttctgtccttgaggaggaggaggaaatggtttgggcctctgtgtttacttttggtggcttggatttgcagtgagtgtttgcttttctttcctgggggacggaggaagtgggttaaggagggtgagtggcctgagtcaggaggaaactcaacaggttgggtgctgagttcagattcttccatgctggccagaaaatgcctttccctgagctccagtagacaaatcccagatcctcccacctcactggcgtagggttttaatatttttgttttagagaatggatggcgatgagaattgatttataatcatcatcattatgtgtctagtgatgtctagtgctataaggctggtagagaacaccgggctgatatcttttagccagccatttatgacatgttcaagctttgactccaggttgcccgagtgaaggtgctacaggaggcacacctcagtgtctaggggatggaggcaccgtaccgcctccctggggaccttgcaagccttgcaccttttttttttcatttttttttttttttatttattaggtattttcttcatttacatttccaatgctatcccaaaagtctcccatacaccccccactcccctacccacccactctcacttcttggccctggcattcccctgtactgaggcatataaagtttgcacgaccaatgggcctctctttccactgatggccgactaggccatcttctgatacatatgcagctagaaacacaagctctgggggggggggggaggtactggttagttcatattgttgttccacctatagggttgcagaccccttcagctccttgggtactttctctagctcctccattggaggccctgtgatccatccaatagctgactgtgagcatccacttctgtgtttgctaagccctgccttgcaccttttaacacactcagtagaaggtctgctgtgtgctgtcatgcagagcctgggctgagaaaggttacaagggtctcctttttgacctgggttgtgtagatattttagctgatagtggcaggaggagaaggaggaggaggagggnnnnnnnnnnnnnnnnnnnnnnnnnnnnnnnnnnnnnnnnnnnnnnnnnnnnnnnnnnnnnnnnnnnnnnnnnnnnnnnnnnnnnnnnnnnnnnnnnnnnnnnnnnnnnnnnnnnnnnnnnnnnnnnnnnnnnnnnnnnnnnnnnnnnnnnnnnnnnnnnnnnnnnnnnnnnnnnnnnnnnnnnnnnnnnnnnnnnnnnnnnnnnnnntttcctttttggctacttccccgcctccctcccactctcccccaccccttatccattttctgaaagtatttttttgggcggggggggggggggacgacgactgacagttgtgctttaaacttgtgttgattctaacttgtgttgagcatgcacctggaccaatcacagtgcgtggatgtctttgagcctgtgggttttttttttttttggggggggggttgttttgtttgtttgtttgtttgtttttgtttttgtttttcgagacagggtttctctgtgtagccctggctgtcctggaactcactctgtagaccaggctggcctcgaactcagaaatccgcctgcctctgcctccccagtgttgggattaaaggcgtgtgccaccacgcccggctatgaacctgtgttgagcttctacactgaccaatcacagtgcgcgcatgtccttgagcctgtgacttttgagttcaagcaggttacaatgctcacttgctgtggtcatgatgatcgcagtttcgttccccttgggagggggcaagtgacatacgggtatgaagcttgtactgagcaatgttgatgtggttttatagctctaatggatgctatttgttttttgttctaggagggcactcgagtagttcagcccttatttttagggaaaattattgaatattttgagaagtatgaccccgacgactcggtggctttgcatacagcttatggctacgcagcagtgctgtccatgtgcacgctcatcctggccatactacatcatttgtacttctaccacgtgcagtgcgccgggatgaggctgcgggttgccatgtgccacatgatttaccggaaggtaagtgacctggcttgtcggacatgtccttcatctgaagtttcccataagttagagtcatgtaatgaactgggtgttatggcccatgcccgcactcgcaggaaccggaagagggaagatcacaagttcaaggccctctcagaccacctgacaaaacctggtcataaaaaccaactgtttgaaccacacacgagatgcttgctgtttggtttgggctttagaatatattgttgttattatttattctgcaaactttccctgctataacatggaagtctcttttcgctgtcagactgtggttgcttatggtgcataggcagtctgttggatttagggtgaaatctaggttaaaaaaaaataaatgcagaattgattttttttcacagctaaatcttatagcttttcctttgacaagtcttgtgctgttcactaaagtcttcacggcatcaatgttgtgccaaacattaaactctgggggagcagggtctgtagaattcaacctaggagaacacagtgtctctgagaaaggaaattagggatttttatctttcacatgcttctggagctgtaggtgggcttggctgcctgtacctgtgtacccacctgtctctttttctatgtgtgtgtgtgtatatatatatatatatatatatatatatatatatatatgtgtgtgtgtgtgtataggtgtgaaatgtttaattatgttcaacctaatgttttcaaggaaatatatcagtacggggcatattatagtcgtatggcttggtataacacatgtactttaaacttagaaaagtagttttgggggatgaagaaataaatagttcagtggttaggagcattggctgcttgtccagaggtcccaggttcaattcccagcacccacatggcaactcacaactgcctgtaacttctgttccagggggactcaccctcacacagacatacataccggcaaaacaccaatgtacattaattttttttttaagtagttttggagaaaactttagttcccaggtaccttgtcctgatttttaaagtgtgtgtatatctttctcctactgaagtcgtagcgataggtctggtgtgatacagctttgtgctggggctgccacactattcctggctcatgcggattggaacagttgcgaaggatgtcgataagaagcctccaccgtcagatgggtggatgtgtgtcattggaagtgtcagggtctgatgactctgtcaaggctgttgtatggcaactctacctgttttttttacttttttaacacacaggcattcgtgcgtgtgcgcgcacgcacacacacacacacacacacacacacacacacacacacacacaggctcccaagagcgtgcatgcacatggttcttgttgtctgaagacccatatcctctgcaagagcatgaagtgttcaaaatggctgagacgctttgctaatttgatttagttgtgtggtggcattcggatgacatccggtgattgaagtcactcattgtttaccagtctctggtgtatctggaatgcccatggattttctcagcaaatacgaagtatccctggcacctcttcttttgagcagtcttattaatcttggcgttgtgtggctcatgcaggcccaacatccttaggctctgacaaagacagtgttctcttgatctgtgacatggatctggtaatggtgtcttaggccttcactgccaccaccatcctgtctgaggcttaatctagtaccatacaggagaatattgaagtttctccataaattgtcacggttttaatcttcctggatgccattagtcccccttgtacttaggcattttcattcccactgtggtgcacaccataattacacagtcaggtgtgaggtgtccgttcaggcagtcagggctcctgtgcaggggaattcacttgttattcttcttagtttctctgccaacacttcggaactggcctcggggaaatctgatctagcgtggcagatttgttcacctgcatgtaagtaaacgtctctcagaggtattcattggtcagtatggttatcccaggaaaaatctctttatgaagtcctgagttgctgtgctcagagattcagcctgaaaccctagaaacgtgggaaagatgaatttcctcttgccagccttgcgcaagaagtacgctgaggtgaagtttaagatgctttctttcaggaggatggcttccgggaggctgaggcgggtctgggtgtgtatctgctaggcccttctgcacgtgctcggagctcacgtgaggcttcagtgcctgatccatgatctgaggagaaatcggattgggtggtatacacggagtgactgtttctatcatcacggtagtgtgtgttgctgaatgacctcgtgggatggatcgtacataaaacggcttgttgatctggagaggtggctgggtggataacgagaatgtgcttcacatacaagtataaggaccacaccgttccccaggccctatacaaaagccaggtgcacggcagcttgacctgtctgtaatcttagcacttaagaggtggacatagggcaagttacctggttacactcattaaattggcaacctctgggtttattagtgtcttaattagggttttactgctatgaacagacaccatgaccaaggcaactcttacaaggacaacatttaattggggctggctcacaagttcagaggttcagtctattatcatcaaggtggggacatggcagcatctaggcaggcatggcgcaggaggagctgagaggtctacatcttcatctgaaggctgctagcagactactggcttccaggcagctaaggtgagggtcttaaagcccacacccacagtgacatacttactcaaaccttttaatagtgccactccctggactgagcttatagaaaccattacactgagagacagtgccttagtacattaagtaaagaagaattcataaagaacctggtgtctctgatctctatgcacctgcacatgcgtatgcaacatgagattagccatccatcatcactaagtcaactaagcaaacaaataatgatgaaaagcaacatgctcatattgggaagagggacagagaaatccattctcacactcacacacacacacacactcacacacagatagagagagacagagagacagcatagagagacagagaaacagagagagagagagacagacagacatgactggtcatgtatctactttcacagctttaataaagttatgctggtgctggagtgtcatagtcattcgttttggaaagttaccgtgagttgccagccccattcccgggagaattgctattccctctatgaggagactggtgtcctttctttactagttgacagagacacagaaggaagggacatgtcagcggcttcaggtcacatagggtttgtactttggcttcagtgtgagagaagatcagactggactgaaatggcagatctagtcaaggcgagaatgagctgaaggcactgggaccctccatccccagggcctcctgggctttggtctctccttttctcagacctcggctcagaccttcacagaatttaatttcacaaagggcttaagtaggcactgcatacacacatgatgatggtctcaacaccaaagagggtctcactgttacgctcttccttatagaatatgcaaggcacagagggtttctcccctgagatcactggcttagtcagctgggggcctcctgactttgtgtccctgaagacccgtagcagttccctgttgggactgatttctgaggaatggattttgcgggtggctctcttgcctctgaatgctcaccccgttatgaggtccgttgctgagtgcatctgtgttagtctcttctgcttgctcggcagagcagactacctgatagaatccattctggatagaattgctagtcatcactaactttagagtttcatgaatggaaagttggtgggaggaaatgtgttctccattccagcctctgaggtgagctggctctgcgcacacctcagcttctcattgtagtcacacctctgccttcctaggatatacttccctgtgcttgtgttcagttaacaacttaagtcctgggctgcctcaggggattagggaaaggcaattggtgcaaagtttggcagtctatgatatcagatccatgattctcagatcaatggtgattttgtttttattttaaactaattttagttcagtgtggactatattgccttatatttagacaggacaatatggaatgcccactcatcaaatactttggtcttttcaaagtgaggaacatcaggtggcttgctctgatattttgtctgtgtagggaggacccagagggtgttgtcaaagtgaaaccatgtggtgtttatagcaagtgatactttggcaggacttcctgtcctcgtgttattatcttaacatttgacagttagaatgaactagccgtgctttgtacactgtcgtaatagtttaacgtttttccttctaaatcttttattattttatttttaatatgagcttgcatctggcctgagtgttttgtgggacattaatcctatcaatcttctaagagaatgctaagaggactgttttaatttctgtggttagagacataaactagcaagatgagggagtcatttgctcgaagggatgttactgctgctgcatctgtgatggacatacatggcagctgcctcctgccagctggtaactcagtaactaggtggcctgagagaaactactgggtgtagatcagtggtccctaaattgtgcttttttattggattcatgtggggaaatctttaaatcacccttgttgtgtccggccagcagaccacaacctgggttctagcctggaaaggcattttggaaacctggaagagaagaggggctaggtggcgagataaagaaatgcagctaagacaggcattctgatcaaagctcaattttactgttccacacgcagttatgaagcaggggaaggggcccgattcccgccaattagtcttggaatccaatagcagggtgaccacgtgcaaggctccgaacagcaaagcggcaggttccagcagtgggcatggcagaatgattgagcgggaagctccacccctgagcaagcaggtttcaggctgggggaggggagactacatctcctcccttttgttaacaaaaataaaaaaaaaaaaagaaaaagctggcctgaggcacaaaatttatttatgctcaatagctctgcctgaattctagggctaaagaaaaaacctgtctctgtgggattccctaacttttcttatggtaaactgtatctggcgaagactgtcctttctatcctagtaaacaactaacagaaaagcctggagctgtaggctctgactttataatgctaattagtactgaataggtaacttcctagttgaattttaagtagggcgttggaaccctggctaagtttggctgaacaaatttgaaatacactttattaagaataacactgagttgatattgctccgcagttttggatgacaggcgggaaacagggaggagggggtgacgattagctccgtagtacaaggccaattggctttttattttggggtgggaggcagtgaagatagtatggtctccaacctctctcccccctattaattaagttaaataaggcaacgcttaactgaggtgatcaaaagattttctcatccgtagatgagtgggcttttaaccttggcttgggtggacattgacccgattcctccagtgggtgctgtcacgactcacacctgtggctcttggtatcttttggggagaagaggcagagccgtagatattttttggttttttagccaaaattagataccgacctcctttttaaactgggtataacccacaggaaactcagaaatggtcaagctggaccttcccctgcagtagttctctgcaccaagcgatacccatactgtattcgtatgattacgaactagtatgcacagttctgagtactgtgcagctcctaaaggagaattatcaacctcagatttagcaaggcctaggcaagaattatgtcattagtaacaccacgttttgtggctaaaataggagctggaagtcgttcctcctcatccctgtatttcccacagcctgaggaactaaggacacgttgcagtaacagcaagggtgaaaagcctgaggccagctaagggactaagcccgtctatcagaataaaaaccaatctctattaatatttgaaatatctacttttctagccctcttggtaaacctaaatttcaacttagactgaaagccaagtgctggaatgtcctgggaatcaagatagcagttgccacctgtgtgctcttgggtgcgggaggatgcaagcccgctgcattccagcttaaggtgtagattgacctgcttgaaagacaaaaatcttagagagtgaagagtaacatcacaaagcttcttttggggaagttcaggtactttattcagttgcaaattgtaaagctaaggctagtctctggcctcctgtcgggtagcaggctcagagagtagcaggaaaacagcttttctgggagcttttgttcccagctgaattctaagcacaaaaggaattttagtcttcagaatgatacttacgagaagagtcagaatctgtgtttatctgacgaattaatctctctggcagccaccgcgctccatcttcatctcgtgaaaaaacacaaaccgagcccctaccccaaattagaactggatctggacccttccattcagtgggtccttccattttaccaatgcataagaagtagaagtaactggatgccagtggcgatccactgcagactgacctttaatatcagtttgcaaaatatttagaacaaataaggtaaaggcaaggtgggcctttggtgaccttgggggatatagctgtctatagttcccttaaaaggctgaacaatgatatctggctcttttccgaaataagttaatgcctgccttcttccagtgataatcatctgagccactgctttgtgatatggcaagatattacatttaggagaaatccttgagtgtatctacattataggaaatttttgctatagcagttccataggcacatgagtcatattaaagattaacagatgcaggggcaaggagtaatctatataagtgacaaattgctcttcaatagccttttccactagctgtaaggccagcaatccttctggggttagggatctaggggaagtgggggatgtgctctgaattaactttgctaggtaatttagaatataggaatctctaacattggacagactattagaccagtctaagattgagttagaatgactggtcacactgaagaaaagagaaatcattatgactctattaaatgactaattttactaagtcagaatatacagtctctgatgtaatattgccataaagttaaaaggctagaagctagtctaaactggaaaaatgacaagcaaggatggatctaaaacatgaatttaatttagttttttagtcatttcaatcaggacactgagtcaacttacctgccagctcgtcacacgaattaatatgtttttcagcgttctgtggagaaaacctgtttttccctctcccaataagataacggttttaggatcaatctataagccaataagtagatccctttaagatactataaagcatttattacattctttgacatttaaatactaaattttgaaaataaaagtaagatttaaatagtgtgcatgggaatgcactaaatagtatgtacggggatacaatttctctctttttttgtcttttaagaagttaaagttttaaaatttcacaatacctaaccttttgaattaataacttgttgacaaaatattttaaatacttggctgtaaaggggcagtgactaattgcactttcaatcatttttcttaaggagtggttgtaactagaaagctagcaaagttattaagagtcacatgtgcataatttatttattaactagaaatatgtacaagcaattgcaaatttgagaattaatagcatctgagggatgaacaattttaagcaattgtgagctcagagataaggcattgactattaatatacaaattaaggtttgattgttcagcattttaaaacaacatctacagcacacaactagattatttgtgctgaaacaggggaaactgtgtcttaagactccgccccacagaagctagttgggcccacgtgggccaacgatcggctgggaggatgagaaaaatgactttacaataatgttttttctggccaaagaattgtcttgggcacaactaatatttaattaccaattaataacaattataaaagctttctttattttttgtaaaaccttttgtagtaaactaaaaccctaagcaataaaagtatattgtctctgaatcctttgggtgagagcaaggatttaaggtaaacttcctttgagaagcattagttaatacttttcacttaggaaacaatatacactgaaagattaaaactcttggcttcttgtatagaagcagaaacaataaaaatttttcttacataatataaagttacattagccatacctagaggcaaaattttctagtaattaccagttcactagaagcaaaactctttgaatttaagcattattctaaacatctgaatagatctgcaacactgttaaaaagaaattttcttgaacacagggaaaaactttctcaggcactgtttgcaaaacaaaggaaggccacaaggcgctctggggctgcccagagccctgcattgactcaaatgtaaaatactttttaatctgagcatcctggccctcctgtaataaggaccgattctagagaaacaatataactgtctacgcctctaaattttgatactctttcttaagatgacttacagttaaaatgttcttcacaactttagtgttgtgaaaaaattgcccgtactgcagtttcctgccaggcagcaactatagccaaactgattgtctaatctattcacaaagacaaacataactagataactctgtcacagttttgtatgagctgtatgagcgctctcataagatgattactcttgtaattatcttaattacagtatacaggtgaattaaagatcttaaatttgcaatcaaactgcaagctgcagtcaatggaacactggcaattttaaccatagttttttaagtttcttgtgcaaagttaggataatacctataaccttgggaaagcaaaacccaagtttaaaacagtttatcatctttaaaatcaatattagaagcattactatcatattatgaagtttggatgtcagttaatacctatgaattcctattaaagcaagctttactgctttaataaagaggcattgttttagatcttatcttaaattttactatttaggataggaaccacattaattattatctaaactagaaatatctttagagacccagcctcttggcctgctttatgccacgtgtcggaaggactctaaacttgagttatcaaatttaacactaaccatctgtagcaatgtaacaattattaatcttaatcaacaactcatgagctgaatgtgaaaatatgcagagcacatttttaataaaaaagaaccaaatgaagcagttacatttagaccaatcagagaatattaatttttgtagctacaatcatagaataaaaggcactttaccattgtcaaacacattagtcacaaaccatttatcagcttttttaccccgaaactaagaggctgtgcactcgcccttatttcctaaaacgaacagtttttccagcaggggtcctcctgccacgtgtctgattcctggctgaaacacgtggcagctctcggctttgcagataaagttttttataccatctttattatccaacataaaacatagaacattcattcatacagactggacacgaacatacatgaattgaacacgagaacagattggtgcaccagacattagacgagacacaaaagggaacagagtactcctgctataaggcccagagagaaatttctctctgctttttgggacattttcctccctcatgatgcagtttttattaactgcggcaatccccctgtttattaatttccttttaataagccctttcttttctcacgcctaatgtagcttcggagagccacggcctaccgcctgttacagttcccagttcctcttaagcttcactgctgaacctaagtgaaccagcgctagggtttaacgctgtctcagcttagcccataccttctccggtatgaatttcctttatcctttaattattccatggagctccaaaccagcagtgtctcttccaaaaatcctttgccgtttctcagtctcgcattggttcgccaaatgtgtccggccagcagaccacaacctgggttctagcctggaaaggcattttggaaacctgcaagagaagaggggctaggtgtcgagataaagaaatgtagctaagacagtcattctgatcaaagctcaattttactgttccgcacgcaattataaagcaggggaaggaggcccgattcccaccaattaatcttggggtccaatagcagggtgaccacgtgcaaggctccgaacagcaaagcggcaggttccagcagtgggcgtggcagaatgattgagcgggaagctccacccctgagcaagcaggtttcaggctgggggaggggagactacaaccctgatgctggcttcaccctgtagatattttggggtgatttttttgtctcctagacaaatcctagtaagcctcacacgtacattcatcttaactttcagttcgtggtggtcgcctgtggtgtacaggttcaacctcctcagcagtgagcctcctcagcagtgagtgacagggctggatttgccggattgcaggcacatagctcagtcatgcacttctgtcagcctggagggagagtcttagatgggctggttctcctgtgaaggcgtgcctaggagctgagtcaagttgtccaggtcctgataagaggcacagtggcatgtcaggtaagtggacattgtaaacctgggatgacaagagttactagacctgaatttcagtctcatttttttccctgtttcaaattgtaaacattttagataggggagcatgttaatttctcccagccttggtttcccaatctttaaaatggcataaattagactcgcttgtcttaggactcacggaggagccagaggatgggcagcagctcccttcaccaactgtagctgaataggactccgctttccagtcttgtgtgtttgaggctctcgggaggcctggccttagtttttctgggccgaggttagtttgttctcaggtagggttcctttacgtcagctctgtctgctggaggtttgctgctgctgttgtgttgaatgtctgtcaggaacagattcaagcgggtggtggtggtggggttattttggcttatgagtttggacacagtcatctgtctccgtgtttccccaactgcctcccctgcgttgcctctcctagtgaccttgttccttgagtaggccacagctacagcttgcagaacatcagaaacgtgccactttgtggagaccaagtgctcactctgtgagcctctaaggcacatcattagtgttctctcctcaggcggtgctgccctgtgcattgtgggatgccgaacaccagagtcctttatctcggagtcttgcacgctgcctgctttctgttatctgcaaacactggcctcatagtggtcctgctctgttgccttttatggtggagcaggaggagtgggctggtgtggtatgggcttgttagtccagatgtttataaactacagagctggaagctctgtctgtatagtgcagggtacggtggcaggacttgctgggcatagtccttaccttccctcggggcagacggagtgaccacatgtgtcagaagagggtccataggttttgtcttgagtcacactgctgttgtcgtggaaggtgacaggcacagtacttgagggtcttgtgggaacagatatggcctccttgaaagggacactacagcttcaactctgccctttttattttaatttttttttgcctgtgttcactctgaagtcacagcaaatgatgttaaaacatttctgacagtaaaatcatcacttcactgactgaaatgaatttccatcctgttccagcttttaaggcacctttctgggtttaatgtttgtagcgggtggctatctcctttccggttctcaaaggtgagttggcttgttttcagaacattcaaagcacaaaacaaagtcttgatccaatacacggatcgtttcaaacacagcccgcccagatatgccgcactcaccacattctgtagccaccgctgccattgttcctggaatccctttcatcttgcaaacccaaacctctgtaggcactggataccgactcccactctccattccaccctggtccctagcaaccaccatcctgatttctagctctgtgagctggaccactctccaagcacctgatttaacggactcctggagtggttgtccttttacagctggtgtatatatatatatatatatatatatatatatatatatatatcagtatcactttgagtaatgaacttggtcatgactcttcaggaccagttcctgtgggaaaatggcagtgcggccacatgagtggtcgtgatgacgtgtctgctgctccttcgagaaaaaggaaagggtttcagagattctttcctgtctgctctaagctctgagaaagcaccatcttacctgtttgtatgtcctcgtctcttcccctgcactccccagggactcattagtagcagacagttattgtctctgtccccatctccaggaggttacagatgttagtctatctacatctgcttgataaactagtctttgagcccgaaggagtggggagatacagggtttggaaaaagtaacttgaaaatgaccatgtttcctgtagagggccacctgtgctgtgttccctgtagaaggccacctgtgctgtgttccctgtagagggccacctgtgccgtgtttcctgtagagggccacctgtgccgtgtttcctgtagagggccacctgtgctgtgttccctgtagagggccacctgtgctgtgtttcctgtagagggccacctgtgctgtgttccttgtagaaggccacctgtgttgtgttccctgtagagggccacctgtgccgtgtttcctgtagagggccacctgtgccgtgtttcctatagagggccacctgtgccgtgtttcctgtagggggccacctgtgccgagtttcctgtagagggccacctgtgctgggcctttctctccatggccttgttcttcttcttgggaaaggttagggattggtgcttctgagaagtgtggtacacggtgcagtgtgcagtacttagactgcatggcctgaagtccattgttctttttctctcttggcagaagcaatgctccctactgatttattacttacaggcgtcctcaaagcttcaaacatggctttgagggacaggaatgagtgagggaaccactcattttgcaatattaaaacgtctgcattgttacttatagtttatgatgggtgaccagccacccacacaagagtgatactttagtaaacacacaaccttagggtgaaaagtaaaattgcattcatacacacacatacacatacacacacacacacacacacacacacacacaccacagactcacaagcatgccaggcacatgcaaacacacacaagacacatgcagagaaatgcacacatagacacatgtgcacatacacatacacacacagacatacatacacagacatacactcatgcactcacacgtgcacacacacacacacacacacacacacgttaccgtgcatgtttgggggtcagattacagtttccggggctccccactcccttccagcattggggttccaagggatcactcagcttgtcttggaaactgccgcttttacccacaagccacctcgcaggcccagtattttccttttgactgattctcagtaaaactatatgccattatacgccatggtaagtcaggcactgtcacattgctctatccagttgctcttttgtcctgacagaaggcatatgatgaaaaaaatactgaacatatagtccaaaatgattgtgcatatagttgttatacaggagtcggttttgagttcacatgtaaattttcattattaaacatgctgttttccagaagaaataagatataaacccattttgtagttttgtgttttagaggcaaaccagaaagaaaaacataccaggattcttagaggaccgtagccgcttgtctccttgtccctccctgaaaggttctcttctcaccaaccttatctttttgggctttctcacactgttgcctataactcagcttcactaggattgctgcggcctctccttctctttccccctcatggggcttctcttcaaacgtaggaattggtggcagaagggtgtgcatgagagagaggtctttctgctgtcttgtggagctgtcttttcgcttcggacagactgccgtgagctgtgcagtggcagttaaccgtggagccggttcagtggtgcgggtttgctgtcaccctgtactgatggctcgtactcgtcaaaacacttcttcttagctcataattaggctttctaaaacgttcccgagtaccatggacacccggggagccctgagatcctgcgtctagcatcttttctgacatcctatggttgcagagcgtggttgtccatgctttgacctgggctcccaagcctttagagagtccgacctcagggacccacggtggctttgagcaaacctcgtctctgtcctggaagtgggagaggcgagggaatgtggcggctcctgatgaattgcactctctgggatcgtcatgtgtgactgacactcagcatgacctcagagcatggatcccagggcccttccccgaagtgggggagtcaggtggggtcacatgcatatcctcacggccagacaggcgaggctagtcagcgtgtgcatgtctgatgccttagctgtggcctctggtagaagtggggtgaaaggaaagccatctatcaggtacctcatgcaggtgaatgttgcgtcgtccttcagagctggacagatctgctagccatagacagtcagataaagcaaaacagaaaagaaatccctaaggtgccagactatcagactatagcgagaggcaggttgttggttttgtctgcggtttttcatttccctgaaccagtttctctctccggaatgagagggcacaagcctggcctggtgcagccgttattctcccgttatgctcatcttatcgctggaggatattgggcagtccctgcagcctccctttgagaaacagcacagccgcttttagttgtgcaatcatgaagagggcgtgacagcattactaagcatctccagccagtaacatcgggaaaatccaggtggcctctgcttcagcgagctatgcagtcgccctgcatagctgcctgtcccagtaatgccccgcttacctggaagccaccttatctaacagactggggtggggtcacgaacactgcactctgaaggtccctcaggggtctacatgctgctgctctgccttgacccagtggtctcaatacgatagggagtcatggggactagtgtgctgagcctggtgacaggggacgagggagaatcgactgaggaatccaagcgcacaggcctgaggcattctgggagaagcctcacactgagggtcgacagcggtaagggtgagttggtgaggaatctgcagtgtgatcaggaggtgttcacacctgtattggcaggactgttagacgggggtctctagaaggtttctgtgaaaatggcagccggatacttcattagttatgagtcttccgctttagttcttctcccagttagagagtggagtctgtcaggaagggacggcctctcggtgatgtgggtgacatgaggcacatgccgctggcctcagggagcagggagagatgcgtatggatgctccgtcaggactcttttttttttgttgttgttctgtttttcgagacagggtttctctgtgtagccctggctgtcctggaactcactctgtagaccaggctggcctcgaactcagaaatccgcctgcctctgcctctgaagtgctggaattaaaggcgtgagccaccaccgcccggaaggactcactctttatgtgtccctggccatagacggtaggacggtgccacttacatgggcggtgacccacctcagttagcctaacctagcaagcctgtcaacaggcaaacccagatgtttccctctgtaattccagatccttccaatcaagcctagccctcccagactcctaaggggaaagcacaccccacccgtcctcctcggcagtcacttctgtggaagtgaaggacacttgtctcaccacgctacccacgttgatatgtggcatttatgtgcatgcttctgctttacgtttcatatttacagccaaaaataatccagataaaaacatagtttaacaatgaatgggcgggggtggggcggggggagactgtttgctttttaattttaatttttttaaatttatttttgtttatgttgtacttacttgtctatatggtacctcatgcatgcaagtgcccacagaggccagaagagggcatcacgtccttcaaagctggcagtggaggtggttatgggccatcccaggaactgaaccttggttctctgcaagagcaactagtgctcccaatcacatatgtgtgtgtgtgtgtgtgtgtgtgtgtgtgtgtgtgtgtgtgtctgtctgtctgtctgtctgtctctctgtatgtgcatatgtatgtatctgtgtcaccactcgcaaatagtcagagggcagcagaagtcatttctctcttctgctatctgatctggtgattgaacccagatccttggacttggtgggaagagcccatacccactgagtcacctcctggtgcacccgctgcctcctacccgacctgaccaggacgtatctaaggatcgtcgttcctttcccttcctgtctctctccctccatcctctccccggtgctgggatcaaatcaaagccgtgcacgtgatcggctgatgatgtctggcagagccatggcctcagccctcgttcctgtttctgcccgacggttggtttctcacctgttctccaggattttgactgggttgcatgatagtctcctatagcacgctcacgttgttctttcgattgtaaactacagaaataagaacatggtcttgtaataccagatatttgggaggccagagcagggtgttgtcacaagttcaagtccagtttgggcaacttagtctccaaatgaaatgtacagtgagggtttaggagtgcatgtcaatgatagagacgagagacgagattgcctagcctgtgcgaggttcccggtagaaccctagccttccccgattccccccgtgctcttagttactctgcaaatatccagtgggaacaaatgttaattggtagattttctttttagatttcagatgtatattttctactctagaatactgtttcattcttttcgatggtgtccacttctctcctaaaatcatccatctatccatttgtcgtgaccgtgttcctctttggctacatatccatgattccagcagttgttttatgttcctttgctaatcccacgagctggatatctatctgggcatctttctattgacactcaccctctgtgactatgggtcgctgtttttttttttttaattttttatttttctcctttgctcgttgtaacaatctctctaccatgttgcgttgggggtgttatactgcagggagtctggattacagagtgttggtttctgttttggaggttggtccctaccagagtggccctgtctgtctctctgtgcatctcagctgcaaggcggctatttccattctgaactcagtccaagggcctggccgactctgtagacagatctttatcactaatgcatggccttcctggcatcgttatcgaatggccgaggcagtcaggaagaaccttagctctgtctgggcgaaccctggcgtttcatagccattctgacctcagactcccactctggcactcagctctgcccctggacagcgaaggccttggcaaagagccattggtaaatccccacaaaaaatcccaggtctagcctctgtggctgtgacccataaactccacgtgcttctcctgttcagagtgggcatcttttttcgttggttggggaaatgcactctggttgggcagaaagccaggtgagtcctggccaatactgagtttccttccctcagggctcgaagtcctgcagtgcctgcagtcagagtgtggggacagctgcttcctgtgccgtccaagccaatggctggctgcatactggcgggcgaggccagcagactggcaccaattaatcactctctggtgacagaggacagagtctgccagttgtgtctgtgactgtcttcctcactgataatattaaaggcacgtcactgttctgttctttgcttttttccctctgatctcactgtagtgagatgggtttttaaaaatgaaacagaacatactaagtttgagactgattgcacagctctggtagcttctggaacagcctggctttccttccctgcagtacaggtggtctcagtgacaggtagccctgcatgagagagggtctgtgtcccacacagatggccactggggtctcactcatcgctgtgcgccctctgactgtgatgctgaggagacacattgcatgctgttctgacttttgttttctgtttagttgttgtgatcaatttaggattagagtatgggatgtcttttgtgtgcctcatttcattctttacttgttcatttgggcttttaaaatccaaggtctgtctttatagcgcagcctggcctctaactcaaccctcctgtctttacctgtagggtatagggattacaggcatgggggcccatgcttggttgtcatcttactttaactattagaactgggcatcaaggctggcatttgggaggctgaggcaggcggacctttgtgagttcaaggctagcctgtcgtacgtagtgagttccaggacagtcaaggctacatagactcaaaatatcaaaaataacaaaacaaacaaacaacaaaaaaataaaatcaagtattcattcataagtttgcagtgtgttttctgcatataggattgacacttgtttcaatataaacgtaggtgctaaaaatattttcacatagccagtgaaaagtcagtggccaaagtccctgagttctgtctctttctgtggtacctgtatactctcttcataatatataggctgctgttgtttttctttctctaaacatggtctcattatataggcttacacacacacacacacacacacacacacacacacacacacacacacagagaaatgggaaaaaaggggcttgaggctttattgtagccccaggttgggagagagcactaaacagaaaatggtacagtatgaaccaaattttattatattttttcttgaatatagatttttttctcatataatatattctaattatagtttcccctccctccatacctcccagttcctccctacctcccctcacatccatatccacgctctttctgtctctcattagaaaacaaacgggattctaagtgatgatattaatataaaacaaaacaattacactggagtagaacaggacagacagaaggaaaagaacaagaaaaggtataagaaacagataaagacacagagacccattggatcacagactcaggaatcctatagaaacaccaccagatatatacatatatatgtgtgtatgtaagcatgtatgtatgcattcacatggggggcagggcgtggtggtggaacctgtagggttaagaaaagagaaagaagagtaaacaaaagaaaccaaactccccagcaggacactatgagacaagacctcccagagatatggttaagttcccttcctcttggccaccctgttggccacgtggcctgcccttaagagtagtttgtttttcccagtgagattcccttgaagaaaactaaattgtcatttgcaagtggttatcaattagagattgctctggactagggatggggtgtgaatgcacttctactctcagcactagacccggtctcgtgcagacctgtgcagacctgtgcagacctgtgcagacctgtgcagacccgtgcagacccgtgcagccctgtgctcccatgtattttaactgtaacatctttattacttttttttgaaaacttcaaccatgcatgcagcatatctttaccatacccctccccactctttctctagatctctttctacctttgcccgacttcatgtcctcattttttgcttttttcttttttaaacatgaaatgccaatttgtgtttctcctatttgcatgagcatggtgtcgtccacggagtgtgtcttttctccaccttgccttgctggtctttaccttgttctgctgcctaggctggccctgaactttctgcgatcctcctgcctctgccttcccagtgtcagaattacagacgggccgtcttatggttggtaactcatgttgcatggagttacttgtattttagtgttgtttatatctggttctcctttgcctttacatagctgcctggtcattcattacctgttgccttggtgtctactgcagtctctttgttttctcttcatctggcaatgtggtgcactccagcttaaagttaaaaacgagctggagagttggctcaatggttaagagcactgactgctcttccagaggtccttagttcaagtcccagcaaccacatggtggctcacaaccatctgtcatgggatctgacgccctcttctggtgtattagaagatggctactgtgtattcatagaaaataaatgaatttttaacaacaataacaaaacaaaacaaaaacccaagacaaaccgtcttcactgttccaggttctcgttccgactttagctacttctctctcccctccaagatcagctttgggccttctctacttagccaccccacctttctctcctctgtacgtctcacaagctgctcattgatccatggcaccttcctttgtcccctgaagctgttccttgtcccctgttctcctgccaccatgccggagaaggagaccttccccagtatctgtccactgctctgctgcccgagacctcagactgaattcatcacaagtgcttctgccatgtcccaattgtgggtcctcctgtgcctctgggccctgtctctggcagatacccaagacagaagcgccgcttctctttcatttgtgactcttggagacaagcgagggccgtttccatatacaggaggcagaagccatgaccacgtgtacttaagtgatatctggccaagaattaatagcacattcagtgttcatacaaatcctgcatttttctctacttccaccgtctccctactgagctggtttactttggtaggctgtggagtgtccactgacatacacggggcatgtggccattcatcaataagaatgagttgattttctcctgcttccttcacctccgttgctgtccttgaagatattgctgttggtgccagacattagggctgtcgtcatggcttttacaccacagaagaccccatgaacatgcgtttctctttttcccgtgcttgcgagagtgttaggacaggatctgattctccactctgctcatttattccaggcactccggttaagtaactcggccatggggaagacaaccacaggccagatagttaacctgctgtccaacgacgtgaacaaattcgaccaagtacgttccatctctgtcagttcctgccccaattttccccctttttaatctgttggaatgtgagggttttggtgtagactaggattttttctgaagttgtgacataggcactttaaagccacatctcagttctgtgtgcagcataggtgtggtaagatgtgttgaccccatagagcccagttttgcttttctgatgttgcctgcagcacacatctacagtgagttggcggagagcaatattcctcccgacttggttagtgcagtgatagtctcgaggggctacctcctcatagtaatttttagcacatgacagaggagcagccagctgtctgtctgtctttctctttttctaaaggacccaagtattggagggcaggagtgtgcagtacagcccccctccatgtggtacctggttcataggaacagtttgatagggcatgtcgcatggtgctacctagctagaatttacggctctcgcccacacccgtttttatggtcggtcaccttacagattgatcactctagctttaggtcagatctgcccagcaaccattcccctttcagattttcattcatcagacatacacctcacctgcagagtgtggtaggcgccatagcataggcttttctggggagacccaggggagatgcagttcacttgtagagcagagggtgggttcgcttccacacacgaggaattaaagatcgggaccgtctctgggatggtgcagtctatccatcttataacagggaccacggtctactgttcatcgcacaagtgtagcatctgcagtgagacctacggttctgcctcagcagtgttaagcccgctcgctgagccccggttctctttgcattcttgtcttcccgtttggagcataatgttgctggcatgcgttcccacctgtcttgttttatttacagtcctaagcatgtgtgggctttgtatctgcaggtgacaatcttcttgcactttctgtgggcagggccgctgcaggccatcgcggtaaccgtcctcctctgggtggagataggaatctcctgcctggcgggcttggccgttctggttattcttctgcctctgcaaagctgcatcgggaagctgttctcgtcactgcggtaagagggacgctgggctgaagagatgtcctgtttggtaacaccagtcccctctccgcccctgcctgagactgctacccagaaacaaaatagaaacttcttatattttctgcatatgctgccggcccttcaggcttagctgggggtactccagccataagcggagggctggtcttggaaggggaagggggaaggtattggctggctgctctctgctggcttttcagtgtaaccacttagaaagcatccttgctgtaagttacgcatgtagatgttgttaaaatcaagtggtagtaaacacaattattttattttgtatattttattccgcccatcatccatccacccatccgtccgtccgtccgttgtgtgtctatggggacggtgcacatgtgccacagtgcatatatgaaggtcagaggacaattggcatctcagggtccgaatcccaacgttctatagattcatccacactgcgtgttatggagctgctcccgtatgcatatgtatgctgttttcactccagtatttccattgaattacaaactctcagggcgcagggccaaccttaacagaacctcgtggaagtctcaccatcctagcagggtgtgtgtcagaaacatggctgctaacacaagcctgaattgatcatgaagtgaccatggcccgaagcaggttccaggagtcgaagccagtctccgtagaggcctctggatgagggtggagatgccacaccgtttgaaggcatcaggctctttccttctgagcctgtgctctgtgtggtctcctctgtgttgaatgtcctctgccagttctaaagctcctgacatgctgtggctgtctgctgactcttttcccggcaggatgagcaagcctttctgctccacagcctttctgatcctgtctctttccacctctgccaactgtgtcctgtcagacgtaggtgatttcagtaccttgtgcccccctcaatataccagaatcatttttgggttttcttcagcagtcattcacaatgttccataatacgcagagttggcagaggtggctgactgttcattcggccttctatgtgtgtgctgcatgtaggacccacccatgctgcatgtaggacccacccatgctgtgggagcagaggaccgcctttgactctgggtccctgtctgtgcctgtgattgatacacaaaagttggctgccttccatgtggcttatctgtcacatctgtccccctcaggagtaaaactgcggctttcacggatgccaggatccggaccatgaatgaagtcataacaggcatgaggataataaagatgtatgcgtgggagaaatcgtttgctgacctcattgccaatctgagaaagtaagtcttggggtagactggactgtcttgtgcacttttctatttcctaattttaccgaatgaatttagagttctctttgatctccctggtaactcacctcagatatgatgtggtcacctgctgtggcagagtgttaagtataatgacctgggacatcccttttaacctgggcttctgtgtgccattattcccaggcaaaagctgcatttctcctcttcttgttcgtacctgtctgtctctgtctgtctcgatctcattctggttttgatggtgctggggactgaaccaagagattcacttgttctggacaagtatcacagcacacaccactgagccgcacgtccagccttcaggtgcactgccatagtcgaatggagttcaaaatgttcctgaatgcttcaccttccctataaataatgattccaagatgcaaaactctgagataattacattggtgaagctctacttgatgtcattgttcattgggaaggtggtatgaaccggttgccaccgtgtccagccagacttgatgcctgggtgtcactcactcgagattgttaggtgaaatgtttttctgtttgtcctaaacatttgagcttttttctttttcactctgtctggcacaggcacttaacctcttgtagccgtggatgtctgtgacctctgtatctgaagtgccctccatacgtagaaacctttcctgttctttgtctctggcttctaccaggcacaccactacccacctctgcactcttccccatgcctatgactccctgtgccagctctttctgtctagaattttgggggaaaataacgatttcaggggtacagttctctcctgagctccaggaggggagagctgtgtctcgcccacctttaggttacctgtgaggttcctaacctgtgaggacttcacctgtatgtatgctggttgaaggcatttgtatgggccctcgataaaatcagctcagagtggcccacagaataaccctgcggctctaccgtcatttggctgaatgagaaaagtggtttcttggtgtcctgtgtggttactgaagctgtccccctggtatgtgctagcaactgttgctgtaatatcacagaccatttaaaaattgcttatcatgtgtgtgcatgtttacatgtatgtaggaatgtgtgcacgtgggaatcacctgctcacgtgcagaggcacaacctcaggaggcacccgccttaattttttgagacaggcgttctcactgggaactggggtcgaacgattcagctaggctggtagccactgagctgagggacatacctgcctctgtcttctcagtgctagaagtgcaggctcacattactttgagtagattttatcaagaagatgaacacaaatgcattctgttagcatcagtccccggcctcgtctctctgagtggtagattccttcctgcccaaaaggagtcccactcagctcaggcctctactctgcctagttgtccagtgagtctcgaacagtaattctcaatctatggatcaagacccctgtgggtcacctaagaccatctgtgacccacaggggactaagacacagtcttctctgtgagcccagcaacttgctggagaagagaagagcaaccctaaaactatagaatctcccccaagatcttaggcagaaacatctggcacagagcatcctagggcatggagaagcgtagactcgtgcatatagctggtctttatgtggatgctatgatgaaactaagggcttcatgcttgcccggaaacactttgcaggccgagccatctcttctgtccccacaggcagttaaccttgatgtgtgtgtactgcctaacagggtcctcattcatatgacatcgatgttgaattttctgtgtggggaaaaaaaaatctgtttttctctcttccaggaaggagatttccaagattctgggcagctcctacctcagagggatgaacatggcgtcgtttttcatcgcaaacaaagtcatcctgttcgtgaccttcactagctacgtgctgcttggcaatgagattacagctagccacgtgtttgtggccatgactctgtacggtgccgttcggttgacagtcaccctcttcttcccgtcagccattgagagagggtcagaggccatcgtcagcattcggaggatcaaggtttgtgtacagtacaatcttaaagttggagatgtcttttgagtcagatggtactttccctgctgactgtcactgtgtctccgaactgttagtcaatctcaagtggtgtgtacatgtcgtagtcttaggtacagtacgctaaaagtccagaagaatttctgatctgtcatgggcacaatataaataccaacagccagcatcagggtcttaatatataatggtgattggcaacttttatcttctagaccactggttctcacccttcctattgctatgaccctttaatacagctcctcatgttgtggggaccccccaaccgtaagatttattttcattgctacttcataattttgctgttatgatttgtaatgtaaatatctgatatgcagatggtcttaagcgacccaaagggtctcagcccatagactgggaactgctgctttcgactacaggacaactaggcagggactgagtacaggcctgagtgagtgacattcctgttggactggaagggctcttagagagaggatggactgtaccaatcaaacccttgtttaaaaatggatctgtccatctcagctgttttgctagttcccctctggctctgtctttccctccagtctgcttttcactttctttctcttctaagagccttttttttttttttctagcaggcattttccttggctagtctgttgatttccaccacatttacccaagtagccactcctatgaccctgaactgctaagggcagatcattcatagagccttgatgctggtctggtgcataaggaatgctaagtgctggtgtgtcgacgaatgtgtctggaggagctggttggtgcggtaacaggcctgggcacaaaccgtgttttatttctggttctcagtgttgttcattgtccaataccagatttccatcaaaccttagggggaatgaatgtagaggagggggaagggcttgccataaaagccaggaggggtttttttttttccttcctgaaattttgatttttttttcttcccaaagtatcatgtggagttcttaggtctaaattgtgcctctatatcagtcccccaaagctctagggacattgaaaggactacgtagagggtggggagatgtgtaacatctgagaagcttggtgtatgtagctgttgtgctcagactcactgcagatgcgcatctgagcacaagaactgggaaaggttgagcctgtgcacctttcattatggatgaaagggaaggaagagggaaggacccaggaggccacggaagtggcagggggcttgctgagaaggtgggttctaggcggaggggagtgagggagcgggaaaatgactgaaattcattataacaataagaggaactgtcacacattatacacagttactacctatagaatagatgtaggatacctatagaatagatcagtcatgtagggttagttctggacctatagaatagatgtagaatacctatagaatagatcagtcatgtagggttagttctggaccagacctgagtttatcattccttctggcaatggttgaatagcattgttgaggggtgacacagggcatttaattatttctttttttctttctttttttttttttaactttcaaatctgaggctatatgttgaccgtaccatcattctaaatgtataatataaaactttcccttctgtgcctttacacggtgttattctgttgtaattctactgttgctgccactgcttcccctagacttgagagctactctgtggggatcaggagccaggctgtttcctaatcctctgcacgtagcagcagttgaatatcagcacccaccactgtctctgctgtacagagagattgtgccttttgtagggtgacagtgcccctctcatagggtgacagtgctccacacataggttgtatgtgacagagcgaggacctctctgagagcttcggcttctaaaccagtgtcgtatcggccacactgcttagtaactctgagggtgcaggatgtacacctgcgtagctcagccttttaagaagtttctctgcttcctgtagatgcagacatttgagggctgggtttgcagctctcccggtcagcttctacgctctctcagctcccgctgtataagaccagtgccacacagcccactgtcacgggctacataatggatgcccggtcagcgctgttggtaggagtttcagttacaggatgtgcgtggtgtgtcaacatggtggagtggcgtttgaatgaagttgctcagggagccgtgatacgtggttcagcggtgttgaggaatatggtagaaggggatagacaggccagcacaaacatcacttcaacgaaatgaagagtgctcagcgggcttctgaaactgtgttccttcaaaaggagaggtaaactgaggcaggagagggaagagctgacatctggtagaccatgagagatgcggtgggaagctgctctggttagtcttagggtcgcatgtgtctgtctgtctgcctgtttgctggacatgggctcatgtaggcaatcctagtcgtagctcatgtgtggctggcctgtgggaatgaagacaacagatcacatcttaggctactggggtcttggagagaggtttgtaggaagaagttttcatacacagggaaacaaaacaaaatagttctgtttttttttcccaaggatttaacaaacaagtgttaaggttggaatataaggtgttccgttccaaaagacacacctgtttaaggcttggtccccaatgagagggaccagactagtgattgattggatcaggagggcttgacctaatcaatggattaggccattgatggactccatgatttgatggcacagctgagaggtggtgggaattttctagcgtgagcccagcgggaggaagtgggatgcttggggagctgttcttggaggctgcgtctggatctttattttcaggatgctgtggggttagctgcctccccatcccttgttcctgatggcgtggtattttcgccagtcctctggcactgtaagtctagttgttttctcagccatgaaaagtgaccggccgcagagtgtcgtgtccaggtttgtagctttgtggacttatagattagaatgctgaggacttaaaggattttttaagcttcaggaaatgatatggtgctgtttctttccaggtatgctcagataccctctttagttgcctgctctgttagtggtgtgcgtggctaaagaacacccacagtacagcccgatagtctcaccgacagtgcattgatctcatgcaagctatttgtgaggtttcttgtacaaattgacgtctgaagcaaaagatccctgctgggtcacagttgtggaagctgcaggtgacagcagagccatgctccttcagaagccactgggggacagcctttcctctcctgacctagcatccaaggggacctgggtaccattccagtctgtgtcgccaaggccacacagtcgttttgtacccgtgggtttgactttctaatctcatgcaaagaagccagctgtgttggatttagggcccacgtgtggccttgtctttgctgtatctgaaatgatccggtttccaaataaacacacatttcaaggttccgggggcagaaggacctcaaggtgtgtttctgaagaaggggtaccttaatctgtttgtgctcccataacaaaactccacagtttgtgaagagtacaaatttgtttttcatagctctggatgccaggaggtacaaggccaggtagggttcaggcaggcttggctgtcggctttctgcttccaggatggtgcccccctgtcttatgctctggagggtagggcatcgtgtcctcatacagtagaagaccgagagagccgggtgctgtgcgatgcctcccttgtaggaggtttggccccattcacagtgcagagcctgtagtgtagtttaatcgcctctttaaaaaactacctcttaaattttgtttttccctactagggctcaaaacccaggctgttgcttaggctatgtaagtgaagtaatactcaggtacaggctcagctcaaagacctacatcatttcccatcattattagcagctattaatttttataaaacaatgggcgtcattgtgatatttcatatatatgtgtgtgtgtgtgtgtgtgtgtgtgtgtgtgtatttatatatatttcactttgatcatcttcagttttctcttactcctgttccttgcttgctctacctcctggtactttcaggtgctatctgtattgttctggtaatattgtttggttattttcctttttgttaatctttaatctttcttttggtttgttcccttagaatgagatttgcatgttccatatttgtgtgtgtgagatgtgtatgtatgtgtggggtgtatgcatgtatgtgtctgtgtgttgtgtgtgcatgtgtgtgtagtgtgtatgtgtgtgtttgtgtgtggtgtttgtgtgtatgtggtgtgtgtggtgtgtatgcgtgcacatgtgtgtagtgtcagttgcacatatgtgtgtgtgtgtatatgatgtgtgtgtatgtgtatgtgtggtgtatgcctgtgtagtgtgtatgcacgcatgtggtatgtctatgtttggtatgtatgcaagtgtgtgtgcgcttgtatgtgtgtgtgtgaaatcgaggctccatatgtgaacaaagacatgacatttgtctttctgagtttaattttcttggtaggaacatgtctggctccacctgtgttcctgcaaatgacagttttgttcttttttatggccaaataaaactgcattgtttatggcacgttttcgttcaacacttgtctcctgatggatcccactctaactacataacgcctcagctgttgcggcctgtgctgtgataagtagatatgcacctggggttccagtgaggcctagacaccctcagaagcatcccagcagtgacaagcctggaccccagggttgttttatttttagttttctttctcaggagcctccttagtgtaactttgcattaccctcagcagggtttaaggaacccttcgctagccttgctaatgtttcttgtcatatgttttttttttagtgatgttccgactgagttgtgatttccctgatagttaagaatgttgaatggttcttagatatatattgctcatttgtactttgtcttttttaaaaagttcttttaatattgtacatacaggtatttgcccgtgtgtctgtaccatgtccctgcctggtgcccatggatgtaaggagagggtattgcgtcctctgtcactgaagttaccgatggctgtgagccactcgctgggaatcgaatccagctcctgtaggagagaagccaatgctcttaacccataggctggttttatttgtcaagttgacacaaactggggtcatttgggaagagggaacctcaacttaggaaatacctccattgattagcctgggggaagtcctcttgattaataagggacatgggagagccaactcactgtgggaagtgtcaccctagacaagtggcccaggttctacaagagagtcggctgtgaagagcaagccagtaagcagcctcctccatggcctctgcctcagttcctgcctccacattcctgccttgtgccaggagactcccagcctggagagggtagtgacaggggacacagagtagggctctggtgtggctttgaaatctgagggtctccggaatttctagctctctaactgtactgaaatgctgatgataacttctaaaaattcctaaaaactttcttgttctttttgagggtaagaagctgctggcttaggtgattgacacctgtagcctgacagaggcggggccaagcaatgtggcctttgttctatctcagcaggaatctcgaagctctatcagcaggctagtaggaagtcacaggaagaaaaagagactctgaaaagtgattatagtgtttgctatgttactaaaatgtttcctatgaaagatatctaagggggaaagcagaaagatcctaagtggggaaagggaaaaatccttcctagctttttgtctaagacgtgttctgtcccaaaaagttctcctcagctcagttcctctcagctcagttcctctctttgtcctcagcactgaaaacatctttcagaatacatgatcacgtgttgaaaagttcatcgcaggttcacacataaaatcaaatcataaactgaaatagttagtagtttacaacagagaatgtttacacacatatccattaggagtaattatctggctaaacatccatcacctgtcacagatccacaggttcacaggaggtttaaaaccataactaagttattagtgaagttttgtataaatgaacccagtcaatattttatattctgtcctagcacctataataaatcattagtttgctttttatgacctttggttagttgttttacaacgtcttggaatgtgctcagagtagaagaaagtctggttaccatctaggaaaaattaactggtgacacatgggagactggcagagttctcattgcaacgttgactatcagaaaaggacctaatagtagtcccactataaaagagcttaataatcactcatataattttaggaattcttatagtattgtcataaagacttaagaagtcatctatctgtctatgtagcattatcacaagacagtacttctttgctcaaaagaggtgggctaatgccgagtgattgttatatatgtttaataataacaggaaaagcatattagtagcgggggtctttcctaaaatgaattctcctgggccttgcctatcagagcgaatcggtcactgattataatccaaagcagaccatctcaggaagatcacctgctggtcattagcttgtcctataatggcttctgacagccttgagttcctgacctgacttcccccagtaatggagtgtcacctgagagttgtcaggcgacatcaaccctctcctctccaagttgcttttggccatgatgttgatcacagccatagaaagcagacagggacgagcactgagctgtttttccagccctgtggatggcatcttttgagaactgcttgctgctctctccttaggatgctttgagccttgggcatttagcttatttgaatcctttatgcattgtagatattattccctgtcagatgccgggctggcaagctctttctcccatccttcagttgtcttttatggccgtagtttcctttgctatgccgaaaccttttaattctatttgccagttctcatcattaatgttcccagagtcctttgcagaagtccttgtccatgcttgcaatttgaagtgctttctgtttgctctagcagcttcagagtcacagttctggccttgaggtctttgatcaatttcgaatagatttccactgtagtttttttttctgagtgagttatgcctggcatttgaggaacaggagggccccttcttgctgtcattagattctaagcgttagcaggacttcgtgttgctgcttagactgcaccgaccagctcctgactgggtggaatgcagcagttagggaagatgctttcgaaatgtatttgagagtggtgactttgaggctaccccatggcaactcgtgacacgctggttggttaaaggggagacgggcagtggctgagctgtggcagtacgtggcatggcgtgacaggaagatgggcagagttgacctttcccccctctctgctgcgggtctcaggccctgccacctttgtagcctgacaacattcatcctaggagcagccttggctttcttctggctttagcatggtgtttggcatatgataagcacccagtaaatatttatcaaggcatttccttccatcttccatgtgtttactattaaaatacaacaaaacaaaatcaaaacaataccaaggtccagttctatgtgcaatgtccagttctacatgcattcagtttcttatcaatgttttcattttatagaggaactggtgtatgtgttgagaacgttgcaaggactttgctcaggttcgaaacttggtgtgcatgaaatcgtgtgtatagtatgcagtctgttaatacatagcatgttctgatacgatttcacattttacttttaaggtatttttattacagttttatttactgtgtgtgaggggacacacgatgtccaggcatgtatgtggaggtcagagtataactggtgagagtctccctgttcaccctctgcatcctaggactgagttagattggcagcctttgtggcagaccctctcactgactgctgaggcagcccctagctccatgtgttgacactttaaatagagttggatagataatccttaggctgtaagacgcttacctcagacgttccatggagacaccggtttctgttttatttctgtagttaaaacagcccgtgctttccttttctctagaactttctgttactcgatgaactaccacagcgcaaagcccatgtaccatctgatggcaaagccattgtccacgtgcaagatttcaccgctttctgggacaaggtaacctcccgtgatttctgagacaccgtgggtgacactgatgaagcagagaattctgagagttttacgtagtctgtaaggggcagtcagttcatctattgaagttttctgtaaaatttcttaaaatccccaaacttgaaagttgtttttaaaaaatattttattttatgtgtatgtgtgtgggtctgagtacatatttgtgtggagttgcccgtggcggtcagaaaagggcatcagagcctctggagctgggcttccagggggttccaagccaccatgggggtgctgggagccaaacccaagttctctggaagagcagacagtgctcctaactgctgagccgtttctccagctcctggaggttgttgtctatcacggaaactttgatcattgccttggtttgagctgaaagtgttgacaccagcagtgttagaatgcatggggtcagtatgggatcagttaactgtgcatattctataggctaactgcacattctataggttaactgcatattctataggctaactgcacattctataggttaactgcatattctataggctaactgcacattctataggttaactgcatattctataggctaactgcacattctataggttaactgcatattctataggctaactgcacgttctataggttaactgcatatattttataggttaaccaggtgcattctatagattaactgcacattctataggttaactgcgtacttctataggttaatactatacattctgtgggttaaccgaatgcattctataggtcaattgtgcacattctataggttaacttcatgtattctaaactatcctagatttttgaatcttgttttaacatcatcttgtagcacttgaagaacagtctgcaatttgcatttttgtctggtatcaagtctgggaactcgacctcttagatgagtgcacagaccacagcatctcagcatcgctctccacagttaccattggttgagtgtgttaggctgttgatgtgttggtgttagatttagacgaaagctcttactgtttggtgatcgacactctgaaggtccgtgcttcagatgtcagccacctttctctctcccgatacctctcgcttcttctgaatcctggccaagctggtgtgccagttagaaaggcagcctcactctggtcctggtctgagctactccattaagacccccatagcacacgcttctcaattggttttgcaacgtgtgggagttctatagagatgtgaatttgatttggcgtcttgaaatttaacggagaaactatgaagcacctaaaaaatgaccaatggttaagtttcttgaaatctaccttatgtgacgtgtttgaatcaaatgttccagaattttggtatttccatgtccatcatgagaaaccttgatgatgagatctgagaataatcatggaaaccgtgtgtgcctcctatctgtcttatacacatggccttaatatgatttatcagtgagttcacagatggagtctcacacttgggctgccaatatattccactggaaagaactcagtgttcagtttttgaatttggaatacttcaataaaacatgcatagagccttaccttttgttaaaatgtgtcgattgctcgtggatgtggtttctgatagatcccgtcctccttccccacccgctgctgtgttgaagcctgtacctccaccgtgtttatggtagctgggccgtgttgtccctgttcggcatggtgtcagtaaggcacatcacatgacttggacctactaacctaccctgggtttaatggcttaagttttgctgttaaactcgagccatattgaccatattgtgggacttactttccgtgattgatttcatgacatcagatgcagtcccgtgtccctgagtgcattgctggaaggactcattggcaagccacagttagggatggtaccaaactgctcatcacggctgggcatgccacattcttctactgccacctcgtgggagctgatgacatagaagattaaaacctaaggcccctgtgaaaatttaggaatgattaaaatcctcctgtgtgtgttgttctatgtaaaatacttgttttagtgcattaagtatgaaccaagagtctctcagctcccacattgtccttctaccacttaaattctgtattcacatggaaatctggactcatttctttaaataggttgagtttatctaaataaaaagcttgaaaaggctgtcaagatgtgacagccaaagtgaggaggaaataggggctgtgcgtgtgtgtctgcagccgtggttttatgtcttctactgcttaaagtgatggtgctagttctttaaaatgagactttttttttttttttgtaaactttacctcataggcactagacagtccaaccctgcaaggtctttcctttattgccagacctggtgagttgttagccgtggttggcccagttggagcaggcaaggtaagttttttgttttgtcttgtctttgggttggctcactgggagttacttatgtgaccacgagtcaggatggaaggactaggggagtgggctacttctttttgtcagtgtgcctgtggctgtctggctttcaacagttcttaggacatacccaagtcatgtcagtacatatttagctcaagcacatccatggtttatgctatggttggaccaaaagatgcacagagaagcccaggcccaggcagctctgggttctgggcaaggcagacagatggtcttaaggctgtgtctcaagttctctgatcatggtaggcatacacttgttaaactggtataggattccatctttgtatgagaaggcttattcctcagaattcatttaagtaaatatcttctgagtgcatcggatgcatactcggtgcatggcctttctggggtcagcacataaaacagaggagatctggattatcaggatgcggccgcagcttcgctcagtattggatggctgaaacctctatggtgctggggctgtattactgccaatggtttttgtttgtttgtttgtttattaattgataactgattaatgattgattgattgaggctggatctcaaaatacgcacaatggcctcaaacttgtatccaaggaaaattttgattgtcttgcctctgtgtccctcgtgctgagcttataggcatgcaccagtgtgaccagcagaaaccattagttatacgacatagttcatgtagtattctcaatggcatatagccagcattgccattaggagcaaggccatttgggagggcaggctgtcacaacctatttctgtaagctttgtttgtttgtttgttagtaaacatcactttactgtggccagtggtgctgtttctgttttgctttcttgttttagctgcagcgtctagtgaccttttatatgagaagctgatgcttgtcaaaccgctgggctgggcagagcccggaacttggtttaattctgtgcctacatgaacagccttatgtgtgttgtgaactctgtttcagtcgtcgctgttgagcgcagtgctgggtgagctgcctcctgccagcgggctggtcagcgtgcacgggaggatcgcctacgtttctcagcagccctgggtgttctcgggcaccgtgaggagcaatattttatttgggaagaaatatgagaaggagcgatatgagaaagtgatcaaggcctgtgctctgaagaaggtgatgactcttgttgggtttcctatactccgtgtaaacgcccgccttcggggcgttctctaagtcatgatactccggctaagcttttggaagcctgcccatccccacccatcactggctgctttggttttgttaggttctgttcagttttcaccatccgtatgcgctgattatcacaatcgtggggagcaccatccttaactttaaaaaaagatgtatttatttttatctcacgtgtatggtgtttcgcctgcatgcatgcctatgtacatctggtgctgacagagaggtcaggagagggtgggggatcccttccaacagaagtcacggatgcttgtgagccactatgtgggtgctggaagtccaacctggctcctagcatccagtgctcctaaccagtgacccacctctttccagtgcctgagctctaacctttataaagcattaaagagttgcagaggttagtgtattgagtccttctgtccccggcacacagctttggcaacagccaggtggtgacgagtctttagtccttaccagctgaacttttgaagccccacccacccccattctaaattatttttccaagcaattttggaccctttgtatttcatctgtgaactttttcattatttgtgtttaaaagaactgtcttggggtggcagagggtggaggttttgggaggtatggctgccacaaccgtatcatccataaggaaatgacaaaattgcttgaggcaatccacagtccagccagtctgttgtgctgggttctaattgttaattcgcacaactttgaggagaggctacagctagggcccagcttttgcttttccctttcctcccttcctcccttcctccnnnnnnnnnnnnnnnnnnnnnnnnnnnnnnnnnnnnnnnnnnnnnnnnnnnnnnnnnnnnnnnnnnnnnnnnnnnnnnnnnnnnnnnnnnnnnnnnnnnnnnnnnnnnnnnnnnnnnnnnnnnnnnnnnnnnnnnnnnnnnnnnnnnnnnnnnnnnnnnnnnnnnnnnnnnnnnnnnnnnnnnnnnnnnnnnnnnnnnnnnnnnnnnnnnnnnnnnnnnnnnnnnnnnnnnnnnnnnnnnnnnnnnnnnnnnnnnnnnnnnnnnnnnnnnnnnnnnnnnnnnnnnnnnnnnnnnnnnnnnnnnnnnnnnnnnnnnnnnnnnnnnnnnnnnnnnnnnnnnnnnnnnnnnnnnnnnnnnnnnnnnnnnnnnnnnnnnnnnnnnnnnnnnnnnnnnnnnnnnnnnnnnnnnnnnnnnnnnnnnnnnnnnnnnnnnnnnnnnnnnnnnnnnnnnnnnnnnnnnnnnnnnnnnnnnnnnnnnnnnnnnnnnnnnnnnnnnnnnnnnnnnnnnnnnnnnnnnnnnnnnnnnnnnnnnnnnnnnnnnnnnnnnnnnnnnnnnnnnnnnnnnnnnnnnnnnnnnnnnnnnnnnnnnnnnnnnnnnnnnnnnnnnnnnnnnnnnnnnnnnnnnnnnnnnnnnnnnnnnnnnnnnnnnnnnnnnnnnnnnnnnnnnnnnnnnnnnnnnnnnnnnnnnnnnnnnnnnnnnnnnnnnnnnnnnnnnnnnnnnnnnnnnnnnnnnnnnnnnnnnnnnnnnnnnnnnnnnnnnnnnnnnnnnnnnnnnnnnnnnnnnnnnnnnnnnnnnnnnnnnnnnnnnnnnnnnnnnnnnnnnnnnnnnnnnnnnnnnnnnnnnnnnnnnnnnnnnnnnnnnnnnnnnnnnnnnnnnnnnnnnnnnnnnnnnnnnnnnnnnnnnnnnnnnnnnnnnnnnnnnnnnnnnnnnnnnnnnnnnnnnnnnnnnnnnnnnnnnnnnnnnnnnnnnnnnnnnnnnnnnnnnnnnnnnnnnnnnnnnnnnnnnnnnnnnnnnnnnnnnnnnnnnnnnnnnnnnnnnnnnnnnnnnnnnnnnnnnnnnnnnnnnnnnnnnnnnnnnnnnnnnnnnnnnnnnnnnnnnnnnnnnnnnnnnnnnnnnnnnnnnnnnnnnnnnnnnnnnnnnnnnnnnnnngcgtgttgatttggatatcttccttcctagattcccaaatgaacattcagttttctttccttcatgtcttggcttgcatgtcacggtgtctttattctacctgctcgtgtaggctttgtctacccctctaccgtgcttgtgaatgtgtggttcatgtgggaggctgagtcagaggttggtggggcggctgtgaaggcgcacattccctggtgagctacatttgctcccgtcgctcttgtgtctgctccttagcggaggcattcagacttgcctgctttggagcagtgtgcatctccgtttggccatcactgggcatctgatttatcccccaggtctgtatcctccaccctccccattcagtcgtttatgatctgtttctacttctatgcccaaagcaccatggtcctctgtaagcgagtcctgacagtggaggctctggaactcgtctagcgcgtgattccttctgtccatgttccctgtagcacagggccctaagcactcacagtgctcaggctgttgtaacagttcctcaggtgggccctgcttgcccctgtgagtgattccctgcatggcatgagccagatcatgtcatcccttgaatgtcataccagtgaagctggggtctgtctctcttcatcaccctcgtctcttagcgctgctccaactccatggcctcaaggttgctgtcctttgaacacagcagatatacaccagctcacaggaactataaattattcctccctgtgtatgatgccatctgttttgcccaggtttcactagccctctccactctaggctctcttggtctgagcagtggctgaccattcagtgaagtggatgtccccccaccccctaccctcccattctcccaccccctaccccacgacccccccatgttctcannnnnnnnnnnnnnnnnnnnnnnnnnnnnnnnnnnnnnnnnnnnnnnnnnnnnnnnnnnnnnnnnnnnnnnnnnnnnnnnnnnnnnnnnnnnnnnnnnnnnnnnnnnnnnnnnnnnnnnnnnnnnnnnnnnnnnnnnnnnnnnnnnnnnnnnnnnnnnnnnnnnnnnnnnnnnnnnnnnnnnnnnnnnnnnnnnnnnnnnnnnnnnnnnnnnnnnnnnnnnnnnnnnnnnnnnnnnnnnnnnnnnnnnnnnnnnnnnnnnnnnnnnnnnnnnnnnnnnnnnnnnnnnnnnnnnnnnnnnnnnnnnnnnnnnnnnnnnnnnnnnnnnnnnnnnnnnnnnnnnnnnnnnnnnnnnnnnnnnnnnnnnnnnnnnnnnnnnnnnnnnnnnnnnnnnnnnnnnnnnnnnnnnnnnnnnnaaaagtgtagcaatgcaatgccctgagtgctttgtcgttgattaaagtgggcgtgcctgctcttccgccctgcaccgcctgcctctgacgtaaagctgccgggcaggactgaggcagagaaacgctgagtctttcctcgtctctcttcacgcaggacctgcagcttctggaggacggggatctgacggttataggagaccggggagccacgctgagtggaggccagaaagctcgggtgaacctggcacggtaacttgctttccgcagccattgtgcatgtgccttgatgaggcttcaggaacgaggcctgcgttgtctgctcagcacctcagtaccgtgtgccgcggatacttcaaatgaacacccagttgccatgagcctggatccctctggccgtgaccaatgaggtgctctccggtctgatttctctctgtgcctttcagggccgtctaccaggacgccgacatctacctccttgatgatccgctcagcgctgtcgatgcagaagtgggcaagcacctgttccaactgtgagtttgttctgtcttacgtcagctctgtgttcgggagccctttcagtggccccgtgagggatttgtaatttctacaacttctctctcctctgttcctctccagatgacccattttacagatgcaaggtcaaggttgaaaaatagagcaggtgccgccagtgcagggacgtgcacagagcccgagtgttagagtttaagaacagaaggcacgtcctctggttccttgaagttcatagtcaagagactgggcgacctgggccccaggcagaaggaagatgtgcagggttagaaggaaggagggggcacggcagcttggtagtggggagtcagcacattttctccgtagtttaaaaataggatttacttgatttcaatgtgtgtctggtgagtgaatgccacatgtgtgaaggtaccggaggaggccagagagggcgctggattccctcgcagctggcgttccaaagggttatgagccacccgacacaggtgctgggacctgaactgtgctcctccacaagtgctttcaactggccatctctgcagctccaccttttacttggcgtgtgagggtgggccctctccagcccctccttcacaatctttaacttggcatgtgaagatgggtttcggtggcagttagcataggacctccatggacagggccttagtagtttacggtcatcggttggctgggccatgtggggacagggactaggggatttcactccttctggtagaaggagcagcagacacagaagtataaaggcacggacaagcaaggcactagaaatcagccaccaaacccagacactattgcgtatgccagcaagattttgctgaaaggaccctgatatagctgtctcgtgtgagactatgccagtgcctggcaaatatagaagtataaaatggaacacagggcccccaatggaaaagctagagaaagcaccaaaggagctgaaggggtctgcaaccctataggtggaacaacaatatgaactaaccagtacctcccggagctcgtgtctctagctgcatatgtagcagaagatggtctagtcggccatcagtggaaagagaggccccttggtcctgcaaactttatatgactcagtacaggggaacgccagggccaagaagtgggagtgggtgggtaggggagcagggcgggggagggtatgggggcctttcgggatatcatttgaaatgtaaataaagaaaatatctaattaaaaaaaaaggcaaaaaagaaaagagcagcaagcacagcgttcccctgtgaggagatgcacatcacacgtgattaagagccccagtgccaacctgcaggtcctggggtctttagctccatgtgacaaaataaaaggcaacagccggtgtggctcacaccgcagagcttccatccctaagagccagggagggtggaagtctgaggtgagaggacactgctggcccagcacatctgtacattttccttcttgggcatctttcctcagatctcctcttcacaggccaccagtcaggtcgattgagaaggcaccccagagcctcccttaccattctctctaaaggctctgtctgtcagtcattaggtgttgcactttagtacatggatttgagggatggcgttcagttcagaacagatttcaggcagagtcaagataacaggtgcccaggctctggactcgaggactggcacccaaggtcatccactgagcggggccttctgaggcttggtgttcagaggagagcgactgcttccgtaccaacacgggatccacgcatgccgcctgatgttgtggtgatgaaaatatcctggaagtggtgatcgtggtggctggaccgcagtgtgactacacttcacgctgtcgtgagacacctaaaatggttaaagtagcgacttttatggcgtgtatatttcaccacagtaaaaataaaaatgaatgcccggtagtgttgagtctttcagaatgcagcaagtgagagcagctggtggttggctttaatgaagctctctcatccgaccctctttttctgacttgatggattctgggcagaatcagccctttgtcccttgggtgagccttgagtggatccattcaagttccccatcacttggagactaattctcgctgggatgctgtaccagagtctctagggaggagagaggaacgcattttaattgctgtgtatcagtatgcagatcacaagggtgctcccaagttcccttttgaacagtgttcataaggtctcctaaaacctttaatgttttaatggctttggatagacacttggtagaagcaagcttgttaaaattggtgcttgctaatcagaaccacgttctttggggggaaacttggagcggggagcacagatgcaatttaggaaatcactcagcggcagctggagaatgttctcaacgagttagaaaattggatcgaacaatatgctatgaaagatggcggccgtgtcgaggcttagaaatgtgaagtgtgtttgtgttaaacgcgaatgagtcactcttctgtttgccattaacattttactccaatcacgaatatacgtccaaggttattacggttttcaagttttacaactatatgttgcaaacagaggaagtgggaggctggggactctcgactgatgccagtctgatgtagctgtggatcctgcattggggaaagtctcagaattatagatggctgcctcttccatgatcttctcagggttttcgcagttagatctcccacactaccaatccctccttcatccttgtagtttataggagctactatgacaaaacgccgcaactgggtgcttataaacaacatgtatttctcacggcctgagatgaagtgctagcagatttgttgttcatagctggatgtcttcttgttttgccctaacgacagctgtggtccacgctttggtttaggaacagcactgaccctgtccatggtggcagattcccatgaaggccccagtgcctcacaccatcacactggtgattaggcttcagcgtatgaacacatacatggacaagggcttcagcatccagcagtggcttaccttccctgcttcagtctttcgtacactctcaccatcaggatgtggttgctcatcatgccagaatgggggacattgttctttgcagtctgccccactgctggtgcctctgtaacccagcactccagcattccacatatgatggcatgttgaatgaggtcgctccttctcagcctgatgactgtgcctcgggaggaaggcgagtagcctgcgtgcctgactttctctcctgcacctccaagaagcattatggctttctaggattgtgtctggcagatgctcatagcccattaaccatagcactcagtgtgggtttttgcactgccttggccttcctgcccacacaggactgagtacatgagagcattccagagccacaacacccgccagggccatagcatctgccagggccacggaaccccctgtatcaccatggttccttccttgcagaggggcctccttctcccacattttctaaaatagcgattcctaccttgtactcacatcatgacatcatgacaccacaacgcgttttcttctgcctcaaacacacacacacacacacacacagattctttaccactcacacacacatgcatgcacacttagaaattttactttttaaaatttaaaagacattctgggaaaaaaaaacccgcctaacttagggaaagtataaaaccactagttagaaaattattctaaggatttccattgtcttggctgtgattggatttgttaggaagaaagcatctccaaccattggcttgggccttgcatgtgtcagagcccacagggctgagggttaacgcctccatggcagtcacatgaagggatgaaggcgggtggccctgagtgagggcacagctcagctgaagccttgagagctgcatccaaggaaggtttatcaggtcgagagatgtaggtgagaactaagccacatcacggcatgctgaaagaggaaaacttaatccttcatagagtgcatgaagggatacatagattatacatggatttgggagtcttggttctgctaacggctgagttctagaaaaaccttcagttttttataaagacttccggtctccaagtggaagcaaagatggttagaagcctagagaaggatacagggcagagctgatagggtttgaacactggtgattgtgttgtaggcctttccccgtgtctgtccctttgtttctcagataagtagtcttaacatctttgttatttataatttttcatattttaaaaattaaactgtaattatgtcatttcccctttttcctttcttccctccaactcctcccatgcgcctggagcccctgctccctcttagaatcatggcttccttttctttagctcttattatcacacatacacacacacatacacacagacacagacacacacagacacacacactcacacagacacacgcgcgcacacacacacgactcacacacacacagacacacacagacacagacacacacacatccttaaatacataaatacaacccagtcagtctacatgatgctccacaagtggttgtggcactcatggctccacaagaggccgggcagcctccgttgacatgtctataacacaactcctgcacctaaaaagctcatgggaacatcactgggaagtgggaggaaacattgccggagccggaaggaacaggaagttcctgtgagatcctgtctcctaaacatgtcagaagctgcacccattaatcctnnnnnnnnnnnnnnnnnnnntggcctgcgtgcctgactttctctcctgcacctccaagaagcgttatggctttctaggattgtgtctggcagatgctcatagcccattaaccatagcactcagtgtgggtttctgcactgccttggccttcctgcccacacaggactgagtacatgagagcattccagagccacaacacccgccagggccatagcacctgccagggccacggaaccccctgtatcaccatggttccttccttgcagaggggcctccttctcccacattttctaaaatagcgattcctaccttgcttcttcttgtactcacatcatgacaccacaacgagttttcttctgcctcaaaaacacacagacactttaccactcccacacacatgcatgtgcacttagaaattttactttttaaaatttaaaagacattctgggaaaaaaaacccacctaacttagggaaagtataaaaccactagttagaaaattattctaaggatttccattgtcttggctgtgattggattttttggaagaaagcatctccaacccatggcttgggccttgcatgcgtcagagcccgcagggctgagggttaacgcctccatggcagtcacatgaagggatgaaggtgggtggccctgagtgagggcacagctcagctgaagccttgagagctgcatccaaggaaggtttatcaggtcgagagatgtaggtgagaactaagccacatcacggcacgctgaaagaggaaaacttaatccttcatagagtgcatgaagggatacatagattatacatggattttggagtcttggttctgctgacagccgagttctagaaaaaccttcagtcttttataaagacttccagtctccaagtggaagcaaagatggttagaagcctagagaaggatacagggcggagctgatagggtttgaacactggtgattgtgttctagacctttccccgtgtctgtccctttgtttctcagataagtagccttaacatctttgttatttataatttttcatattttaaaaattaaactgtaattatgtcatttcccctctttcctttcttccctccaactcctcccatgcgcctggagcccctgctccctcttagaatcatggcttccttttctttagctcttattatcacacatacacacacacatacacacagacacagacacacacagacacacacactcacacagacacacgcgcgcacacacacacacacgactcacacacacacagacacacacagacacacacacacagacacacatacacacacagacacacacgcgcgcacacacacacatacacacagacacacgcacacacagacacagacacacacacacccttaaatacataaatacaacccagtcagtctacatgatgctccacaagtggttgtggcactcatggctccacaagaggccgggcagcctccgttgacatgtctataacacaactcctgcacctaaaaagctcatggaacatcactgggaagtgggaggaaacattgccggagccggaaggaacaggaagttcctgtgagatcctgtctcctagacatgtcagaagctgcacccattaatcctcaccagcaaggccgcctaaaggaaacctgaacgaggacgacagcaataggcatgcgaaggagaagaagctcaagagatctcaactgtagacaaagaactccaagcagctagtccataatgctgagagcctgagaaatagccttccccagggaagagcacagcagttggttatccaaccccgaatggtcagccctgagagtgtacatatacaagtgacattacacagactgaccgggctgtatttgtctatttgtgtgtgtatccaaggtctgtgacgtcacgatgacgtcactagctctgggtagttaactaggttcccagtgataagcatcctttcccttccgttgagagctccccaagtctgttgagtgactggtcactgcttcggtatgagtgtctccactgcacccttaggctgtcaggccgtgtggttgtcattgtggataggtgtctggggtaggactgtggattgcttcccttctttggaggtttgcctagcaccttccagtagcatgaaagctatcttcatggacaagtagccttacttttgagattaagaaactaaggtgccatgagacttagtaactagctagtcagagtagacagagtagagtagagcttgattccgagactttctacggatctccacctgacagccgaagtctgctgggttatggcctgcagccctgccagttgctctgtgtgaggactgccaaacccagggcagactcaggagctctgttggtgatggcccttagctggctgcttcttagctagggctgggctccgctgggtttgctgtgagcgtgtgggtacacttgaaaggcaacagtcaccgcctcagaggttgtgcacttgagatcattgatgccatcttttttaagatttggacgttttagtccttaaagaagataatttgctcccagaatggaagagtaggattgttgcagagactgggtgtggcctcctccatcgatttccaacccactgttatttaggaaaagaggttgataaaggtacatcagaaaagagttactgaggttctaagggcattccttactgtttttattcttattactcatttttgttgttgttgttttgagacagagtctcatgtagcccaggctggcgtcaaacttgctatagagtggaggatgtccttgaactcctaatgccccctctctctcctcctcagtgctgggatagcagggatgtatgtggttatgtggtgttggagttcgaacccagggcgttgtatgtgctaggcctgtgctctgccaactgagttctatccctagcccctaagaatttttattaatcaatgtaggcattggtaagtaagcacctatgcaccatctaagcaagaaagcagcattttcatgtgatgatgtaaatctacttcttnnnnnnnnnnnnnnnnnnnnacacacacacacacacacacgcacacacagacacacacgcgcgcacacacacacacacacacacacgcacacacagacacacgcgcgcgcacacacacacacacacacacacacagacacacgcacacacacacagacacacacacacacctaaatacataaatacaacccagtcagtctacatgatgctccacaagtggctgtgaggtgccggcagcctccgttgacacgtctataacacaactcctgcacctaaaaagctcatggaacatcactgggaagtgggaggaaacattgccggagccggaaggaacaggaagttcctgtgagatcctgtctcctagacatgtcagaagctgtacccattaatcctcaccagcaaggccgcctaaaggaaacctgaacgaggatgacagcaatagacaggcgaaggagagaagctcaagagcactcaactctagacaaagaactccaagcagctagtccataatgctgagagccggagaaatagccttccccagggaagagcacagcagttggttatccaaccctgaatggtcagccctgagagtgtacatatacaagtgacattacacagactgaccgggctgtatttgtctatttgtgtgtgtgtgtccaaggtctgtgacatcacaatgacgtcactagctctgggtagttaactagtgctaagcatcctttcacttccgttgagagctccccaagtctgttgagtgactggtcgctgcttaggtatgagtgtctccactgcacccttaggctgtcaggccgtgtggttgtcattgtggataggtgtctggggtaggactgtggattgcttcccttctttggaggtttgcctagcaccttccagtagtatgaacgctatcttcatggacaagtagccttacttttgagattaagaaagtaaggtgccatgacacctagtaactagctagtcagagtagacagtgattcaaagagcttgattccgagactttctactgatctccacctgacagccgaagtctgctgggttatggcctgcagccctgccatttnnnnnnnnnnnnnnnnnnnnnnnnnnnnnnnnnnnngctgggctccgctgggtttgctgtgagcgtgtgggtacacttgaaggcaacagtcaccgcctcagaggttgtgcacttgagatcattgatgccatcttttttaagatttggacgttttagtccttaaagaagataatttgctcccagaatggaagagtaggattgttgcagagactgggtgtggcctcctccatcgatttccaacccactgttatttaggaaaagaggttgataaaggtacatcagaaaagagttactgaggttctaagggcattccttactgtttttattcttattactcatttttgttgttgttgttttgagacagagtctcatgtagcccaggctggcgtcaaacttgctatagagtggaggatgtccttgaactcctaatgccccctctctctcctcctcagtgctgggatagcagggatgtatgtggttatgtggtgttggagttcgaacccagggcgttgtatgtgctaggcctgtgctctgccaactgagttctatccctagcccctaagaatttttattaatcaatgcaggcattgtaagtaagcacctacacaccatctaagcaagaaagccgcattttcatgtgatgatgtaagtccacttcttcaattcctgtatcacaagaagctaactggactctgggctggagggatggctcagcggttaagagcactggctactctcccagaggtcctgagttcattcccagccaccacttggtggctcacagctatctgtgttgggatctgatgccctcttctggcatgcagacatacatgcagggagaacactgtacataataaatgaatctttaaaacaacaacaacaacaaaaaaccaaacaacaacaacaaaaacccaaggtgatggtacctaaaaaaatacacccaaggttgacctttggtctccatcataaacacttgcataccatgtgcatatatatatataaaaaaaagataactaggattttagtcaagtcaagttttggaatactatttttgtttagctgtttttatcatgcgccacacaaatttctttttttgtcatgtaatgtgtaaattttcataatcattaaacttaagtttgagaagaaaaatgagcagtcaaagccctttcttttggctactttgcaaagcctgttcgtgccaggctcaggtgcttacagtgggtttgagtactgagctcagatcgctaatttattcttgtatgtaatgtcaaagattcatttttattacttttcagtcatgtatgtgtgtctctgggtgggtatatgcccataagtgtaagtcccctcagagtccagaagagggccttggatggatgggcctgaagttgaagttattatagctcttgagagctgcctagcgtgggtggtgagaacagaactgggctcctcttcgagagcagtgtctaccgttaacgactaacctgtctctccagcttgtatctaatttgcctttaaacagcttttaaaatgcacactgctgctgtgttgccgttctctcgttctctcgttatggcttgagcatctgtttatagctgtgagagccctgctaacgtgctttctcctctggcggcttccgttggcaggtgtatctgtcaggcgttgcacgagaagatcaccattttagtgactcaccagttacagtacctcaaagctgcaagccacatcctcatactcaaagatgtaagtaattcctttaaaaaagcagactcggagtttgttaggagattttttttttaaaatacagattttaagcagtgggcattcagggaaagaaatgcccttgagaagaaagtaaaacagacccaagagcaatgttaggggtttcttgaaggcgcgacctgagtgtgagtaacttagatgtccattgaaccagctagagcctcaggtgtgttgaaactcgggtttcccatcagagtgtgctccagggactccccgggaagccgggaagctctcttcccttcctttattttccgtccgtttcctggagttgagattcaaagctttgaggatatccaaaggacttctagaaatagcagtaggaggtctggggatgtggccccattggaagagagtctgcctgacatgcacaaaagcctgggtcacgtccccagcactccatccactgggtgtgctggtgcacctctttattctcagaggtagagatgggaggatcagaagttcaaggtgttcttatgtagagcgttcaaggccagactgggatacatgaaaacctgtttcatgtgatcaggcaagcaagcaagcaggcaggcaggtaggccggccggccggcaggcaggcaggcaggcaagcagataataataaggacgaccctagcaggaagcagaaatgtcagttattagtcctcatacatacagattataaaattgctccctcaaatctgcaagctgctctagggaggagattaatgatggcgaaggtactgttttcttagaggttttcgtttcgtctctccaagacctaagtcacagtagataatttggaagttacatcttccatgtgtcctgaattgtcatctactgtttgcctaaagggtatctgtactggctggttctatgtgtcaacttgacacaggctggagttatcactgagaaaggagctttagctggggaaatgcctccatgagatccaactgtgggtcattttctcaattagtgatcaagggggaagggccccttgtgggtggtaccatccctggactggtagtcttgggttctataagaaagcaaggtgagcaagccagtggaagcaagccagtaaaggacatccctccatggcctctgcatcagcccctgctttctgacctgcttgagttccagtcctgacttccttgctgatgaacagcagtatggaagtgtaagccgaataaaccctttcctccccaactgcttcttggtcatgatgtttgtgcaggaatagaaaccctgactaactcagtatctttcacaacaaaaccagtgaatgtgtgagcagccccccactcagagccgcctggctgctgtggccacttgatgctgccctgcacaagtgcttcgctgtgctgattcccgacacagtagcatggcaggtggtcccttgccaccataggcctccattccactcagtaggggtgagaaggctcatgggacagtgacaggaaaacaaagtgactgctgtgcctttacacacagctgggacagggagggccaccgaggcagatggacagcttggagtctccatgtgtgtgccgagtgagctgggcctagagggagttggggttagagcacaggacagtgacctggactgacatggcccctgttgttttatacctagcacggagggagtggggtctcctctgtgatttttcctctcccttcccacccccttctcactaggctatagcagtggcaattagaagtcagccttgtagttcagaaggttgaagaatatgcttaggtcggtgagtcagtttcccaggactgctagaagggacggttgtgagctggggactgaatatgctaggaagttacggtctcacggggccgaagcctgctggtgtgttaggcccaatgactgagctgtctctgaaagctttggggacatctgtttcttgcctccttcacccttggcctcccttggcctctagctgcaattgttccaggttctatctctgtcatcataggtgcaggctgtgtttgcccagatgttttcttattactccagctggactcgcatgacttcactttcgcttgattgtctctgcaaaggtcatgtttcttcataaagtcagatttattcatcccaagggttagagctgcagtgtcttaagggatagggctaccatttaacccctgaggaaaactcatcctactgaagtcaaaattagcagaggtgctggtgacaggctgagtctcctccttggcatgttttctttggtgtatgggtgctaatcctctgcagtgggggtgggggaggggaagggggagggtcaagttctccaccacaggtagaaaacagccccctgagctcgctcctgctcatgtttactgccttctttattcagcatcgttaaccactgagaatttccaacataacgtaacaaaataaaagatagtaagacaaaacaaaacaaaaaaacacatcacattgaagtgggacctgacaagaagccgtgaacaggcacaagcactagagaccccactcactcacacactcgcaagttccatgacaatgctaaactggaagctataatctatacacagaggagatggtgcaggctcatgtaggccctgggtttgctgcttcggtctctgtgagttcatgtgagcttagttgatttggagggctctcctggtgtcctctattcctgctcactcataggccctttctcttcacgtctgtggttttttctgagtcctgggggagagatttggtggagaggacaagtcactttataagcagaaagggtcagagactcagtgtctgtgtttactccctctgcaaagcccttccggctgcagttgtggaagggtacaaggaagaacttatacaagaaacccaacaccagacacactgagaccccacctccccaacctcccaggagcgccacccataggaccaagtctttcatcacacaggaggaacacaaataattaagctatatctaaaccacaggatccttctgtaatctcttggccaaagatggaaatgacaaattcgcattagccagagttccccatgtttgtgtacagttattctcagagaggtagatcacacattcttacagcacataggctgtgtggtgatagtggagcgcctgcagaggtcctttagtgcttgcttgatacttcatgcggctaccaaagagaggcgaggaagctgtcaatcaaagtcccatcaaataggttctcaccacaaagaagattatagaaggcaggatgactacccccttagcaacaacttagtgtgtcagccgtttcctatccccctgggaagaaagctccgattcctcaggctggaaaacaattaatttcatgtgcagagagctgagtattctgcctgcagagccagtaggtatagaatagctttgtcccctgtctgcacatggtgaccgttttctgagatcctgcctcctgcagattctgagttttagtttttagtactcaacaatttattcgtccactagcagggaccctggagagaggaaggcctgctcttactattagtctggcccctgtctaacagcacagaggatggctgcccctttggccccctctctggaaatgccctgtctatcagtagtttcctcgtgtgtcttactgattctgagaggaagggcgttattgtgttaacaagagtgcaaatcgaatcttaccaattgtgttaaacaagtgtgcaaatcgagtcttaccaattgtgttaacaagagtgcaaatcgaatcttaccaattgtgttaacaagtgtgcaaatcgaatcttaccaattgtgttaacaagagtgcaaatcgaatcttaccaattgtgtaaacaagtgggcaaatcgaatcttaccttctaagtgccgcagggcgtggtgcatcaggaataacttcctaattctttagctgtcagactgttaaaagcccaaccgcactgggattttcctcagtggagcaccttgattggggtggggtcgcggggaggacacgggagaaggtggaacctgaccaataacctgaccacttctcacttcagagctgttctcctttgattcagtgcccagtactctcctgtgactttagataaatcatttgagtctctcttcatgggataaaacattgtgaagatatctgcatattatctccttgggtcaggaggaaaccacctgattagatgttgtgtggaatgtcgcgtctttggtgaggatcttaaatctgggggcaagctttagtctggaatttagactgggaagtctgcacgtgactcgtctccgagggggcagccagctaaggctggctaagttcatcctacctaggcagaggtgctcgctacacctcgctgacccggtggattctcccatcatctatgctttttgctcctttcagtgcccattgtgtttgggccgtaaagcacatgacaagttggttttatattgctgagctcctagaatttggcaggaagcacaactctcacttgggtggcttagttgagctactacatagttatcaatggggatcacagacccccaaagcaatcataactgaagaccagttggctttagccagtttattggagttattaagtacaaatatctgcctctaaaattccttttgttttagggtgagatggtgcagaaggggacttacacggagtttctgaaatctggtgtagattttggctccctgttaaagaaagaaaacgaggaagcagagccctccacagccccaggaaccccgacactcaggaaacgaaccttctccgaggcctcaatttggtctcagcagtcatccagaccctcgttgaaagacggggccccagagggccaagacgtgagttcatctcctgctccatggctctcttttgggtttacagaccttgtaatccgttcagtcactctgctggtggcatctgcgtttgtcctggagttggacctgcgactctaaggtgttatgaaatgtcactggtaggattaacatagagtaaaggggaccagccctggctgtcgccttctcttggatgtgggctggaggacatcattgacatccacagtggctatgctactaggagttccaaaggtctgtgtgactggtggatgtctgaagtttaggattcaccacaggcaaatctaaggttattttcgttttcattgctacttcacaactgtaattttgctactgttatgagtcataagacatgtctatgtgttttctaatggtctcaggtgacccttaaaggggtcacccacaggggtgaataccactgacttagggtcttgctgtgttacatccgatactttttgttatttgtagtccatttacaatgtaggtggcagaaaggagtttcttggcctatctttgatgctttttttttagtcaaggacacagatgctaatgtagcccctgacagactttcagagttagctccctctcttccttatgagcccgagggccgcatcttattcttgactgagtgtgcagtagtcagcatagattcatgtatgactttagggcatatgtctgtaccacaccttagcctttcaagcaagtatgcactagtgctcctttaaaaagaaaatcatctcggccagctggtggtgcactcgggaggcagaggcagggggattactgagtttgaggccagcgtgggctacggagtgagttctaggacagccagggctatacagagaagccctgtcttgggagggaaggaaggaagaaaggaaagaaggaaggaagagaagaagggaagaaggaaggaaggaaggaaagaaaggaaggaagagaagaagggaagaaggaaggaaggaaggaaggaaggaaaggaaggaaggaaggaaagaaggaagggagaaaggaaggaaggaaggcaggcaggctggccatcccatctcttggcattgacatggcatgggtttgggtctaggacccccaaggatagcaaggtttgagggagttcaagtttatataaatgcatcatgtgtgcagataacctgggtacttctgtatatttcacggcctccctagattacttataatttgcaatacaacataaatactgtatcgacacttgatacatggaattactggggaatagaggccaagaaaagtgtccatgcatgttcggtacagacaactatttccccctccgaatccttttcagtttgtgagagcagaacccatacatgctgtgtctgactacacttgcagctgtcttcgctgcccacatccccagtctccacaccttggatgatcccggcataaatggatgtgttatcctccctctcttgtagacgtttccactcggctgctccgcttggctagcagtttgagccattcggtcattcttggtgtcttcggtgttgcctttgagcttacagccttttgtgggttaagtgtgcgccctaccgccgatctgttctcccacgctggcctgctttcctgctgcattgcctgcagtcaccattcggaggcttttgtgcttccctttcgcttacagcccctcttaccttccgcaggcagagaacacgcaggcagtgcaacccgaggagagccgttcggaagggagaatcggcttcaaggcctacaagaattacttctcggcgggcgcatcctggttcttcatcattttccttgtgctgcttaacatggtgggccaggtacatcatgacacctgtgccctctcaggatattcacacatgggtttacagtggggtgtgctgtgtggcagggagcagccagagtgttgctaaccgcagtcgagaattgtatagaagaaaaaaagtggggttaccttgtaagagcttagaggtaacaccttgtctgggaagttggccttggcacagcctgagccagctgaccatcctaatgaacgctctgggaccctcctctccgtcccacgtcttcagccattttgagtttctagtttggaagtcacgcaagtcttgccaacgctgtgtctcgcttccctccgcaggttttctatgttcttcaggactggtggctttcccactggtaagttcttctggtcagaattaaaggctctacgatctataggtagtagcttcattttcccataggttttaggaagaggtgggatctgttaggccttctattctaaccttcatcccttgaagaggaaaagtgaaggcttgctggtggggtgtgacccacaccactctttatccatatctggtcaccacctgcaccttgagaactgaacatcaggggtcaaagtttgaagggcagccgcagaaagcgttgtgtgagctgagaattgctttctggcacaaggcctttctcctaagcttaggttccttttgtttttacctaaatccataccttagtaatttttttccctcccatgttccacccatagggcgaacaagcaaggtgcactgaacaacaccagaaatgcgaatggaaatataacggagaccctagacctcagctggtacttaggaatttacgcaggtaacgtttagccatttggtctgttatctgagggcctgaggtgcttacgatgggcctgtgtgagtaaccagagctcctaggagtaattcagtaatgtcttagcagattaggagactccgtcgcatttactctgtgaattaattagaataatttttttttttaaatctacccggagaaagaggttgaatgaagactcttaatttgctctgtactggattttgaaagttaaactaggattgagcgttcagaaaaccagccactggaaatatgtgactattgtctattctaataggtcgctttagctaaatcttatatcattatatgaatgggcagggggattagaaacggatccccaccctgtggcttggattgttccaattctgactgaataagcccaggcctttattgaacttggatggaatcctctggcagcaaggccccccaaataaaatcattatcccctcacaggtatgcaaagctccctacagcacactgctcatctctcgggcttcactaattaccgaagagggaagctaagcagggagaggcccagtgtgcaggaattaaaactccttctctttcctaccttgagaccaacaatgttatcacgtctccgactgtgtgattcatttaacatttggtttgcccgactaatattaacaccccactctgttttcacaagagtgcttggaaaaagtatagagttagttttcaaaagaaaatcctcatctaaaatttcaagtgttcccacgggagacaggctttccttggcttgcacgaattaccgctgttagaagccattcacccaggtttagaacttactttgttgacgtctccctaagaaacctaaatccactgactggttaccgtccctaccggcagactgtgcgaaccctaaagggaaatagatccattatctattcaagtagcctgggcggccaaggaaaacgcagctgtatggagttttagaattaagtagctccaggggttaatgctgcttcattagaaggcaacatgtttaccacatcagctcttcccggtctttgtagcagtgtgagctacaagctaatggaaactagggaagcagagttagggggtagctcaggatagaatgcttgcctcctgtgtgtagcatgacacagcacaccatgcctctccacttcctatccgtgcagaatggttcaagaatgccttaatgcaacacagagtttgaacactgctcatttaaactgtgatatgtttccatgagacatgcattgagtgactagtttactatttagttatcttatgttaaaacatgatttgtatgttctcacaattcaaccgtttcaaagttttcctgtgtgtaagccaatgtgatattttcaaattctttaaagccactcagggggtttactacaaggagggtttaccggtctgaccctcttcccggggagcaccacatgatggtatcagaacccaccacagtgctagattgggggacttgtaaataccagctgggatatgcaggcagaaatctttcctctgagtgcttagtaggacatgcaatttgtttttaaagcctgtagtttatactttatctgcacataggtattttctattcagtaagaaaaaaaaccacttagtttttgtcagtgtgtctcataaatgtgcatcgcctttatgtagaacctagatgtttatggggaagatcagagatatttttataaactgtcgggttgtagaaggaagtgtgtcatttcctcaggatcctggctttcctttatttcaggtctaactgcggtcaccgtcctttttggcatagcgagatccctactggtgttctatatccttgtgaacgcttcccagactttgcacaacaggatgtttgagtccatactgaaggctcccgtgttgttctttgacagaaatccaatcggtaagtcagccgccgagctccccagtaaatgtgtcttgttaaggcgtgtactcacgcaacgagggtctgatggcattctggtctttgagaaaggaggaagtccctctgcgtgtctgcccattctctacagtaagcttccccaatacttctctcctccaatagcaaatctacatatcagctgcatggacttatctcggtgtgtgtgtgtgggggggggcacagcacacgggcactcagtttgcacagtgagttgtgaatccagttgtcactcggctcccagagccccccacataacttgcggacagagtgtagtcgcacagtttctaagacacctactgcatgtacacaacattggcctgtacccccttttaaagagtctcactagaaggaccgccctctgagccggaaatgaggggctgtgtgcttgcttcttgtcttgggggcgaccattccttttgtgaactgtgcggacttcgacctgactgataatgaagataagtctaaaacccccaaagtgtgatcaccccttggtaaattttattttatcttgtttattatgatataacataaatatattcgttatttggtattttgaggtagtatcttgctactgtagccctgggcagactggaagtcactatgtagcccaggctgaccctgaactgatgaagccctgggcagactggaagtcactatgtagcccaggctgaccctgaactgatgaagccctgggcagactggaagtcactatgtagcccaggctgaccctgaactgatgacaactctcttgtcttttcctcacaagtactgagacgctggcatgcaccacaacattcgttttaacactgtcttaaaaatgaacagcaacccccactttccttctccataaccttaaactctgtggcttataagtacgcgtttgttgcgtgacatcatgcctttgcatgaacggatagcggcccccatgatggtcctctgacccatttgcttctgcaggaagctccttggtccaagttcctagaaagcgttagtcatcctcacagaccgtggtcacctgggggtcagaggtggggctcgggcagctttgtttatgcaggtggaaatcaatgggacctgtcacggaggactgtggtaacacagccgccattaaggagctgctggatcaagagcagagcatttgcatagtgtcaggtgagcaatttttgaagtaggatgtgttggtgggaagtacagaccctggtgcctgtggctgtcttggctccctgtgagaatcactggttaaggctgtggcagtgctcataggccgggtactcaatgtccccgcaccttggcattcacatacgtgaaatggggacactgtctgtatctatcatatttaaaactaagacttaagcaggtgagagattttcagtgctccaagtggcttcagccccactgtcggttcccagcgactgagaacagtgactggaagttcaccggaagtgcagtgttcttgcccgtagggtggaattccgacctttcctgttttacgtgattgttgtgaaccacagttgtcacacgcggtcgggctggggctgtggtcagaagttagctggaggatttgctgctgtgatcgatgtcgctgctcggcttagacctgagagttatacttccacccggaatgctcagcaggcagtgctcttctgttgtgactctgctcccggtcctactaaccaggtgcttcatgttcgagaatcgtaagcttttccttgtaccaattttcttatttattgaggggtttagggcccagtctaaatcctgggtaactaattttatgtcaagtcagaaggattcatttggcttctctgtcctgagtctatgagcaggatttttttccttcaatgaaaacagagccctaatgaaccccaaacatagtccttacatgacagaaatgtaaacacgaattgtttacctcttttagtggagtatttaaaataaaatacattttaaaactttttaagacttacgttttcatatgagcaaaattctgcacattttaaaatggtgaagagacacagcctatggattatgctatctatagtctatctataccattaattatttatgtactgcagcggtttatgtaacaagaatgggtacagaagcatcctgttgtgtcatgccgtctcggctacgcagcgtgttggctgagcaatgtaaagacacaagcaacgtgtctttagaaggtgttgcttcacagacagctcccaggagcccctgaggtcagctgcagtgcctcgtcatctctgcatctgggcatcctcccagagtctagataatgtgagggaactaggaagatgcttgccagcatccagtgtccagcaagtgaggcacgggaggacaatgttacagaaacgtgaggtgaggcctcatagctttgcccctgcagagcccctcaccacctctgattctcagagaccatgtgccgtaatttagacgtgtcttggtcttacagtcatgggacttgccatgctccctactcagtactgctatctcgtggcccatgtcctccagaccctccgctctggtgctgatcagtgggtgacctttgcccttgtccagagacccaggttttccttggacgctgctcaaaacactggctaccgagccttcaccccaagttcactgagtggtacttaacggagagagtgagtggggtcagacctgaagatacaggtttcttcttttggcccgagattgccaaaagccaggtctccccttttcctcttgatttctttcctcttccttcttctcagcgctccccacccctctcctttgaggtgacttagaggtggctcttacatccattacagggcctcacatctcagctgcagccctgatcttccacaccaacatttaccttccatgtgtagcactgcagttcaagaagatgtttataaacaaactctggtcaagggtgttaacgcaagtagcaacacccagcaggtttgctttgccagggagcctggacccgggaacctggagcctggagccgggaacttctgacactgagcaccagggggcagcgtgagctgcagaattgcaggcgcagagcccagagagctcacccagcgagacctgggattgctgttacagccttcttgggaaattcccccttcctagtttgtgcctttgtaccttgtcagactccacagaaaatgttaaaaagcattttcttttttggccatttattgtgacagaaacattagtcaaaccaccggcagccctcctcccagcccctccggggtgcacagcctaattcagaagagtttttttatttgtgaagtcacctacgagcccagtttccctaaggtgcattaaagaaatccttacctgcttcttgggaacacctaccatttcagaggacactccgattccccactcaacactagacgcaggagtaggcggaaagggtcctcttggctggatgtatttgattcctatagggtcagttctgacttagtgctgttttcctctcaaaatatgagggttcgggggtggggagaggagtggagggggagagaggtgggagaggagacgatcactgaatttgaggttggtttccacgatgtccgaaggcacagtcctttttttccatccaggcacgcaacatccccttttgcttttggaaacgggagagtggctggtagtggtcccgtcttctgctgcccagttttggtacaggcgcatggctgacagcatcaacttcaggttcacagaaatctactcatttgtcagtctgcgtgggagaaagagagttgctggcgccggctgacgggcttgtctgttttctctgggagacacagagttaatcttggggtggtggtcagtgtgtttattcacatggccgatttttctgccatgtgcgtgagcactggtgtgtgcagcatcacatgatgttaaacaaaagtatcaattccgagtcaccatttttggttgagtatgtgagaaataaaatgctggaaaagaggggaaagaagtacactgacttgtgttatttaaacatatatttatattatatatgtttaatgtgaattatattaaattgagaatgtcaccaatagtcctagactttaagagagactttctcttacccatcctaataaaaaaactctagagattgcatagtgattaagattctcagctcgactgagtgggaaattgggcttgtcgatgacatcacaaacataaactattctgaattaggctctgcatccgggaggggctgggaggagggctgtcagggaggagggctgtcagtcagtggtcttaatattttcctggctctccagcccggaaagagagcgttcagaatctggggtaagttgctaaagaactcctgaggaagtgagaagagagttgaagccacatgggagtgtaccatcagaaaggctgtcttgctgcagcattgatgaaaccgattgtcaacacaccttgtctttgccagaaaagcaagagaagaaagtcctcaatagagaagaaatctaattgcaggatacccgtgtgtttattcagtcccagtgaccactggagttagtgctaaatgcatattttaacaagtataatacagcactgtcaaaattaccttgacaataataggcctgttaaattatagctctatacatgtggaggtaaaatggctctgcttagcacacattaatctatgcctgttcacacaagtgcttctgctgagcaggtagcatgtttaaacaagaaatactggtcttaaaacctctgatttatggtaggtgttttgacacagcatcattcaggcgatttacaaggcacggcttcgtgttaaaatatctcaccggagtcatcatttggcaccgacataaatattcagcggtggtgctggaaacgggtgagatgcccgtttgtgccagatcatcccctgtgtttcctttcaagtgagatctgccgtggatacagctacaagagatgacagtttcccttccttgagagcggatgagctgtaagaagttgaaaataagaataacggcgtcttgacagctgccgtggactcatcctgcccacgttggctttaattctggcataaggcccatgggttaaaaaaaaaaaaaagaaaaaagaaaaaagaaaccaaacaacccctttccttgctttatgcacattgtaaagaatatatttacatgtacatgagttaagtaaagagaccttttctgttcaaaggaagaacttagtcatcggcagaaaagctttgttgcaaaacaaaaacacacattccctgtctccttttttccttgttaataataacaaacgtgagcgagtacagaagggttacataaaagatcgcgttaatcatcgtgatcctcaatagccacgtaaatattatgttttctggtttgaattgaaatagctaatggtttgaagtaggtgtggcaattaattcctgtcaagttgtcacgtattaaaaataatgtttttttttccacataacaatggttatatgtacttaaactcttatgggggggtgatattaagtgatattttatgggcgttgcccatttactgctaatagcataataaaagcctttgttataagtttaaatagttacatagttacatacatctgattgcggttgttatttaatcagtgatctctctaactgacatgattatagtacttttctacagctggtacacattacactgttttagtgtacggttttaaacctgctaaaatgttcctattgctctttatttgtggattttctccatgataaattgggcatggaaatactagcaggtgagtatcacacacacacacacacacacacacacacacacagagagagagagagacagagacagagagagagagagaacgagctagctttgtgttcacagttgtcaaatagaacatttagaacataagatttggggagctgctaacctgtttaaaatgatgatcatgttgtattacagaaagttaaaaggatgacattttgcttaattatttcaaattattttccactaaggcatatattaaatattacatgcatatttatatttcatccttgtccactctatcataaatgttactcattttgcaatgaacaaaactcgggggaaaaatctcaatattggcatcattgagcctgtgacattttatctcacataaagtatatatatatatattttttggtcttctatccagtttatcatagttcttgttagaatgatagttattctttatagtatttagtatgtgagttaatgctagccttgtgaatgtcttctgtgaaggcggatagttctatgcctacgatgttaagtgtgtcatctactgtgagccatccagtgatttgggatctgtgctgtttgagtttccagctcatttagagctcggcatgtgtgcattccttggccattgccttctgggattgaaggtgcaaggtcctacagtgttgtattttgaaagatttctccccaatgctagttctagagccagaagtgcttcgagcaaaaattatattgaggaatgttcataatgtaagttccgcttttgtgcaacatttccagagaaaatgggttggagttctgtaccaagttcatcatgaataaatattgaagctaggggtagtctggctggaataaagcatagtatggggtattgtgtggaagtcagtaaggactagaattctgtttgcttgctttttttttatagttaaaaatccatgtcttgtgttagctttgtgcttcctgctgtcttcaaacgtacctgttatttcatcaccacatttccctgactcaagatcgggcactttgtacttgatgagtaaacgcatattggtttgatagagcaggcgaaagctttgtaggtgcagtctcatctccccaaactacgcccagggagaacaatggagattgatggtcattaggatatgaccgcagccttttgttttatagttagcgcatgtatggaatcaagctctgctttcctgagagcagctgacaagagatcacagatagatcactctagaccgagtccacagagtgggagggcccggatggaaaagccaacactggttcctcagaagctgtgattcataatctatgattctggcccctagatgtttaccaactgaggagaggaaaggtcaaacacccaataaagttcgtgaaaggggacttttagccttcccttaacttggggtttggggtgctttcatagttgtgttttataaactgtgtggcccaatgaaacaggtgaaaacgcatctgttttaagacttgggccgagtagagggtgggaggttaaggcagactgaggttctctgctcttatctggagaggccacagaccagtgattgattgcttcagtcccccggcctcggcctccaacaagtaagcagaggagtttcttttctcctcaggcatctgttggttatcttctatggacctctattaaatctcatcttcacaagcataagcctaaatagccctagacaacaaattattttttaaaaaacataaaaataacccagacactgttctttgattcggcatagtactgacacaattggaaatttccagttgtgggtggagctctagattcacacaggcccctaactcattcccatccatggcctcagagtggatctcttcagcatctgtgacatcagtgactggctctgatgtcatgaggtttccaaaagttcttctcctggtacttcagggtgaattgttttcaaactggaaccatgctggtgggaggatggagtttggagacttgagtacatgattctgtatttaagatcacaattattgagttatagcagactcagaaggctctactctgacccagacactttcctgatccaccagagaagtcaccatgcaacagcttaaaccaggaaccgggcaggggcgtccctttatgaagacttgtgtgcactctatgccttctagaagtctcaacaggaaatagaatacaagcaatgatattttcctctcttagtaatattatcttgcaatcagccataatccattgagtattctcattcttggaaaccaggattaatctttgaggggaaaaatccccctctttaagtagaagccctttaatatctagaagaaaaacttgacaagcttcaaagtgcattttgagtggaagtttattaaaatgctgtggttgtgtagaaagctatcacagaatcaagttctccggtctggaaattcttttgctttcatttctttctttctttcttttttttttctttacatttgcattttaatagattgtatcacgtgggcaaatgtttcaacctcctgaacacctggaaagtctattttagacttgttctgggtgtttggaaatctttagccagacgttattcagcatgcagtcagtgtcatccaggtgggaaaatcctgcctgcaggtctgcctttgctgcagagtggagcaccgtgcagcttgtgggaaaacatccttagaacaggtagccctgcccggggtggggggcggcaacccctcctcctcactttgggattagtggatagcttccgatttctcactgaacttaaagcagaagtttagagatttttggctcaatggctggactccttttgagctcagggaagcctaggatctgatctagagatcagaggcccagttaagaacagcggcagccggtacctaggacatttgcaaagctacttcagtgctagggtatttgttctgacatatattttgtcacgcgtataattgcacacatgtagatcatctgtgctttatggcatagtcagagccctggttaatacattttcattacttttaagtacataggagtagaagaacaatcccgtctcaaaacagaataaaacaaaagaaaacaatccaacaagaatagatgcacaaggaaacactgctttcttgtaagtcatcatgaccaattttacagggggctggagcaatggctccgcagttgacagcatcagtggctcccgcagaggacctgggattggtttccagtctgtgaccgactcaccaacctctctgaccccagttctagggtaatcaatgcttgcttctgacctctgcaggtgttgcgtacatacatgcaggggtcatacatgtacatacaaacactcatacacataacagttttagataattaaaagaaaaatttcttctgttagagacagaatggtctagaatcatgaaattaactgggggcagggcagtgtgtggactataaatttatttttccttttttggagaacaagatagtattgacatattaaaaactgtatctcatgctagtctgaatctctctaaactccatattgtttatcataaagatgagagttaaacatggtttagtgtgtaccatagactgaagttctcatcagtaccaacttttcccttttttgtccatccatccgtctgtctgtacgtccatctttcctgtttttttgtttgtttgtttgtttgagacagggtgtttctgtgtagccctggctgtcctggaacagctttttgactgggctgaccttgaactcacagagatctgcttgcctctgcctcctgagtgctggagttaagtggaaaagaatatggacctcttcatgaattcgcatgccttccttgcacggggaccatgctgatctctgtatcgttccaagtttagcatatgggctgccaaagccttcgcatggtgctggtcttcatgtggccatgttggtgtgaggaaaagtgactgcattccttccctgtggtggtgatcatgtggcgggcactggaaagtcattctcccttgactttcagactaaataagtgggtgttgacatcaccagccaagccagcatgatgagagggggcactgtgtaatctagacatcagctggttatcacaaatccagatggacttctcttcctttaggagtcatccggtctgtaggccaggcaagtacatccagtgcttcttccataactcaggagctccatgcgaagagcttccgcttcctccacgccacattgtctgagcgagcatccttcatccgcactccagaagctgtaggagatgaaagctatttagttgagctttcaggaatgtttctagaatgttctttattagaattaccaagtgctaagatgacaggtcaaagtgtgagcttttgggctgcagaacggggccacctcagttttggatagatgttgcacatcatctatcatctttttttgtttgtttgtttggttttttttttttttttttttttggttttttgagacagggtttctctgtatagccttggctgtcctggaactcactttgtagaccaggctggcctcgaactcagacatttgcctgcctctgcctcccgagtgctgggattgaaggtgcgtgccaccacgcctggctgcacatcatcttttaaccccctccatcctcacatcggcttttgattgggcgtcagagtggacagaacactggttgtcgactaggatgttctgggttgaagcagctgtcctcagtggcgctcatggtcccgtgcgtgtgtgagatttcgtttctcatgataccatgtgttttatatcatttccttctgttaaaggtgtataaggcagaaactttggaaatgaaccaatgggtaggtttacccagcaggaactgcaatgacccctccttaatttccctgtggtgactgcgagccaaggtagtatgtggtgaagaacataactttggaggctacctacctgtctgcagatcacagcctcatgcatgccagactatgaggccttctcaaactgcttccaacaccataagtagcatgggattgatagaactctgtgtgtgtgtgcttgcgaatatgtggatgtgtgtgatgtgagacactgcctggttcataggtaattaaaattgattggttgaatttttcttttttgactgttaaaagatgacatgatacaattttagggattttcctccctctgactgacaaattctaaatcaatagcctaggaagatagcttagttctttttctgttactgtgataaaacaccagaactgccaacaacgtagggaagagaaggtttattttgacctatggttccggaggagtaagagtttgtctcagagtggggaggagcagcaaccaacagcagagggggcgtggcagctggaccgggaagtgagagctcacaccttcaaaggcaggtatgaggcagacactgtgacctggaagtggcatatgatttaaattctcaaagcctgtggggagcgggtgtggcggcagtcccaaaggcgccagagactgcagctaagtcatatgacttgcacctgacttcctcatataagacacaaacatcttgagtactgcgcaggtgtaccaggatacaggtgaatccaatttggtggagatttgcccctgctgccctgattagctgaagcctcgtgactggcgagggggcatggcctgcagtgcgtggatgagagagagtataaaaggagtgagaggcccagggttcgggggagatatataaacaagggagatataaaaacaagggagatataaacaggggagatataaaaacaagggagatataaaaacaagggagatatataaacaagggagatataaaaacaagggagatataaaaacaggggagatataaacaagggagatataaacaggggagatataaacaggggagatataaacaagggagatataaacaagaagaaacaggactgaataaatgtgtgcagaaggatcctgtagcagcgtcgttcttcctggccagttgagcgcgtgcaacaaaagcccaccccccagtgacgaacttcctccccagacagtgccaccagctagggcccaggcgttcaaatacctgggtctgttgtagacatttctccttgaaaccgttatacacgttcccatacgcagcgggtttgcgggaagcgtgctgtcttggctttatggaaaagcagatcacctcagacgaacaagcctcaaacgaaaccggcattgtgtggctttgttgctttgcgtgttttgtttttgtttttgttttcaatggggcttagcttcattccagagttcactttaaacttaatttggttttacaatgagagctcaattttgcatgtaagtaccaaacatctggtttactttttgtttgaagatgatatgactgaagttctgtacagaagtctatttgcaattaaggaaagacggtttgaaattctataaattgagttctatttaaatggcactttggaatcattccaggtgagaggatggttgtacttcctcggagtgggagaaacttcttctttttttttttttccttttttaacactattggcagttaaaatgtagagcttctatgtattcaccttttgcaaaaagcgtgaaaaatgacaaatttcacaagtgaaatctaaagttgacccaaggcagttttagattgttgggccttcaaattttattcctgggatgtttttagagacattctgtggtttgttcactgcagttaattctgggcactccttctccatgtctgtcaagcggtcgttctgacgcttcaaaacttcctcttgcgcaaaatacagttacggcagcctgagaagaaaatgagatttctagttggttcttcgaagctctgggttatctttttagaacattgaagggtgtaataaatcaaacagggcaaatataactttctactatgtcgactgccccattagcatcaataagccagcaatttagatgccataaactactggctgattctaatacccttgagagatatccagatacatagctctgggtggagagatctaacagaaaagtgcttgctgttttgctgccagtgctgaaggtgtgtctgcaggtggggagcccctggccaggctcttcaagaggggaagtcaacattagtcatgtcagagtctccatcaccagctctgtgctgacatttggtgaccctgtcacactataggatttctttagaaataattggaaagaattttttttttagatttatttatttattatacactgtagttgtcttcagacactccagaaggaggagtcagatctcattatggatggttgtgagccaccatgtggttgctgggatttgaactcaagaccttcagaagagcagtcagagctcctaaccgctgagccatctctccaggccctggaaagaagttttttaagttaagaaaaagctaagaaacccctaaagccgacaggttgtggaaagataccgaagggtttcacagcatttccctgcccattcctttgatgtctcagagatcagtcctatgacgggttgtgtctgttggcaatgacaaatctagcttcttatcaaaccgtggatcggccgagagtgggacagatttggcctccttccctgtgtcctgtcacttaacagcaggcttcgttcatttattttggcaacttaaacttctccaaatgttgtcagtttccttatctcccttcacctgctgtcttaacaatgacaacagaaaacaaaacacttaccctggtctctgactcccgagggtctgccatgtgggtgcacaattcctcttgttctcttgtccaggcctcttggtactgtccccattcatttacttgagggttgaaaaaaaccaaaaaaacaaaaaaccttaaagaacaagattcccacgaatcgttaattacagtgagaatttcagctcaacatttactaacctctcagcatgtctgtgtcctaggaatttggagaatactggatagtgtattctctgttctccacggatatcttttctgtttattttgggcatgtacatgtgtggtgtatgaaaccgtttgtgtatgtgtggtcgagtacgtgtggtggtcagaggtcaatcactctctcttattttttgagacagtctttcaccaaacctggaacttaccaatttggtgacattgctaccttgtctggccagcaggcctgggggggtgggggtggggagggggaagggggcacaagtctctgccttgccaccacctacccactgatgctggagttactgatgcacagcactgtgcttgactggagttactggtgcacagcgctgcgctttggggacctggagtccacccctcatgcctgcctggcaggtgcttcagtgcccaacactctcagcacctccttgttcattttctaaagatgtcttactaatacccgtggatcaccacgatccaactgtagtaacatttctcttttctggtaaaaattgaattatttcttctcaagtgagggtgggagtcatagcaatcggaaatacattaacattctctaaaacttgtgtgggcttagcagcccaccactcacccactaggaatctaacaggctgtgctccagaatgtgacatgtttgttgaaattacaaagtctaccttgagtctagtgtggaagtgagtgagaggcatttcagcttctccattcctgctttccttattctgtccagtcgactcttgcctccttgtttgtatcagtcttcgaaaggattttatatttggaaatgaattatttctaaagccacgagagaaagaaaactgtcatggaggaagagctgctgtttctggatgacagatgacaacttctgtcttatgcctctccattttcttgggtcattccccagtatattacccaacctgcatgtatgtgtgtgcatatgcctgcctgccttcctgcctgcctgtctgtctgtgtgtgcacatgtacatgccaagggcacacagctggatcttactgtactgctctgaccgcacttgaatgtcttgcctggaatggtcctactacaaaccccaggtgtatgccaccatgccaagtttttataactttatgaccaaccaaccaacatgtcagaaaagtgttagctctgagatgtataacatttgctattgtgcaggtgacttagaaccatgcttacatactgccatgagatgttctttttttttttttcctgagctgcatttttgagtgggaacactggaatatttgttgtaatcttttaaaaaatatagacatagaacacaaattttcgtggctcgttcctataatcccagcacttgaaaagttaaagcaggagggttgcctgggttcagggtcagccttgtgcgtgcatgtgtgcacagtgtgtgtgtgtgtgtgtgtgtgtgtgtgtagagatcagggggaagaaaacaggaaaaacaatttcaaatcttattaaagtgttattatcaactgttctaaaacatccataaagacaaattaagcacaactgcatattcttctagagctctttaagtggcctattagaaatgcagtataatgtttaataggattaattttcatagattattattatatttatttattttgtattggtagtgagtgtgtggagttcagaagataacttctagtacttggctctcttttcatcatgtgggtcctggggactgaactcgatcatcagctttagtgacaaacacctgtccccacagaatggagatttcagaaggtccttattggaggaactgaggtcaaacactggtggtcattttacaattccatgcgcctgttctctaggcccacagaaacgggagaagcacagggtgaacctccttagtgcagatattttgatgtcagacttgggggcaccagggctcacagtgatggatgactcctgggggtgactcacggggaaggctcacagcgatggcagccgagagtcgcggtgtacagatgcggaaggatcccacagacagacccagttccttcatttgcttatggagttaggctttggggcagagttcagagtgtggctccttgtcctttactcagaaagaacaaattatctcgttactcatttcgctggccggtcactccctcattttatatttacaagaaagtttaatttgtggaatatgtaccgagagagataagcaacaatagctaacaacagaacagaagagtgatgataatgtactatgattaaaagcatttaaaagtttgaattatttgtttctggaatgttccatttaaagaccgtaggttgctaaagccgcagatgaaggtgaggctcagggctttgtcctcactgttctgtgctctggagaggtcgacgtgtttgggggaaaagcagtctctgggagtgtgaaccctcaaaaaccaagtgttcagagttagataacttggtctctgttttttcccttgtagtttttcataagcagtaaacgatgggatagaaagctaatattagctatttttttttaatttcttatttagaaaacgtaagtacatgacttaattattactttttgtgcttttggaaagtgcattttcgtttcttttatgttttgatgttgtactgcttgttgctgtgataaaacacagcacaacacaaaacacaaagtttggagctaagacgaaaggatggactaccccagagactaccccacccgggggtccgtcccataatcagccaccaaacgcaggcactattgcatatgccagcaagactttgctgaaaggaccctgatatagctgtctcttgtgaggctttgccagtgcctggcaaaatagaacagaatgctcgcagtcatctattggatggatcacagggccaccaatggagaagctagagaaagtacccaaggagctaaaggtatctgcaaccctatggaggaacaacaatatgaactaaccaggaccccggagctcttgtctctagctgcatatgtatcagaagatggcctagtctagttggccatcactgggaagagaggccccttggtctagcaaactttatatgccccagtacaggggaatgccagggctaagaagtgggagtgggtgggtaggggaacagggtgggggaagggtattggggacttttgggatagcatttgaaatgtaaatgaaggaaatacctaataaaaaaattaaaataaaaaaaaaagaaaacgtaagtacatgacttaattatgactttctgtgcttttggaaagcgcattttcgtttcttttatgtttgatgctgtattacttgtggttgctgtgataaaacaccatgacagtcatggggtgaaaatctcggcagatggcaggagcccaaagcagcaggatccttcacacagcacacaggaaacggagaacaggaagtgggtcaaggttacagctcttaaagcttaccccaagtgatgaacttcccccatcagggtcatctcttctaaaggtcccatgaccatccctaaacatcaccaccaacagggaccagatatttaagcccatgagcctatggggacatttctcattcaagcgaccacacatcagtgctcattgccaagctgatagaatcaaaacccaccttggagacagaccactgggcatgtctatggggtttatcttgattacatcaatagaaatggaaagacccgccctgtatgggaagccctgttcactgggtgggatcctgaactgggatggcttctgaaggtggatgtggtatgacccactgctctgagcttctgccccttggctccctcacattgatggactaaaccctcaaactgcaagcacacgtgagttcttaactgacgaagttgcctttgctggcgtgttttatcatagcatcagaaaaagtagtaagaaaatagtttccattttaaaattacaaattcctaagttctaaacgctccgtccgttagcaggtgaacagccggtgtctcatttgttaatctgaggcagcaggcctgtgtaagacttcagtttctcctcttcagcctcattcctaagagtccttttgtgtgtttactaaaattcattatttacgcgctgataggaatagggttggggaaggtcttctaccttctgtgacctacaatttagttggagagattggatatagaacttaattcatcctcaatttgagcctctttcttaatagaagcctcagaagtcttcagttctttgaccctttgaccctttatgctttgttgaggacacgcactagacctggacaaaagccaggtgactctcctgattagttgttattgtcaacttgacacaaccaacctaaagctacctgggaagggggagcctcaactgaagaatcgcctcaatccaattggcctatggtcaagtctgtgaggagttgccttgacaggtgatagacatgggagggtccagcccactgtgggcggcaccatccctaggcagacccatctaggctgtataaaaaaacttgtagcaggatgcaagggagagattagccgtctagtggctcttgccttgagtttctgtcctcaaatgatggactgtgactgggaagttttatgtgaaaataacaaaattaacccttccctcctcaagttgcctttggtcagagtattttatcacaacagaaagcaaatagaagtagccatgtatctcaatggaaggtcataaagaagtgaggcttagttggaaagaacattgcccctaaagggccaaggactatatgtgttctgatttgatcagggaaacgctgctggtctgctctctctacccactccagtcttgattccacctcttagcatttttcatttgtcttgctaatttgtgtttgcttatgggccttaaactctgtagccaatgattgctttgaactcctgattcccatgtgctagcttgacagccatgccccacctctggtgtgtgtggcgctgctctgaaatgtttcatgcaagctagacaagcactgtactaactgagctacatggccagccccacctcgtagtgttggatatatcaacctgaacagcctgagctatctggcttgtcacctttgcctcctggttgtaatgtcttggtgaattaaaactctcttactcctttctgatgaaaatattaacagtttccaattgtgactagtaggttcattcagctttaagggaacctttcagagatgagccacaggactttcatctaagggagtggagtccatgacagccgcagagattggattttatttcattctgagcctacactggtattatttaacgcaaccaagttctgaatgctggtagagaacacagctaaggtcatgggctgaaaggactttgatgtcctgcagacgcctgatttccccctaatatgcatgaaaagcttgtgcggtctggctctcaggggatgaatatttgttcctgtgggttacagtagcagacatgacctgtgagtgatgggagatgtcgggtagaatacggatttggaggaaaaggggtaggaacgaatatgaaaaaaattagccatggaaatctacaaatttccaagactattccggcagacttttcagagggactttaccaggcacggcaggcatggtcccacaccctgcaagcggagaatttctgattaaaaaaaaattttttttaaccaaatgagtttgcattcaaaccctttttcctcgcgcaggaattcctactctttcccttcgcgcgttgattctgttggggagggaacacgccatagacggttgattcttaggaccataccgttccggaacagattttggtaacctgaattaatgaaatggtttgggagtcattttgctcatttttgcaagaggagactttgtgtagctgcagagtggttgggagggtgcgtgtgcccgtgtgtgtatacacaagcatacggaggccagaggtcaacattggctgacttctgcagttgctctccaccctagtttttgagacagagtctcaggagcctggatctcagccatctagccaggctacctggccagcaaaacacagggatccttctgctgcctctcttgcctaacttaccacttcaagctctttcctgctgagccatctctctagtccccaagagaaaactgaatcacttgccaggctttaatgtgtttgtgaattccttggtggcccttcacttgctatgggactctctgctgactcttgttcagcttctggggccaaaggccatctttggttctcagcaggtagacaccttccctcatgacagcgagctccatcatcagcacgccgggtgtgggtggtgggcatgctgggtggtgagtgcgtgccagagtagaggtgcagagacgcattttctgtggctggcagcagccatgaggggagactcagagaagtcgttggtgcaaaggcagggggttgaggaagaggagctgtcccaaaagttggggctggggacatggaaatagccagggactttggcatggactgtagaacggattggaggtcaacttggaacccacgggtttccatttgtgcagttgcctactctgtaccgagggctgtccgagcagttatggaggcacatgctggtacatacgtgattgaccgtcaaatattctgctctaaggcctttttgttttcctagtagagcacccactgattgagggtgttgtactaggggtgtggggtgagagaaatagagcaattgaataggacactgggtggctcagtatcttgaagctgcaaagaaggaacacagaaggaagagcaagacgaattcttccatttgttacattttaatcccgccttccttgaggtagaggcaaaccagaaccatataaatgtgcatgtcttttctgagcactcccggccccattgggtatggggctgtggaggtgccgaggctgggggcacttggggccgggagtatttatttttgctaccccccacaagcttaccctcacgcttttgtatcagcgccaagtttctgtgttgcagctgccacaggcagaggctgggacgttcctcttgctctgaacttgaccactggtgatttgtttgttttctcacctttactgacacctgggcttggcaatcccttgtcattcttcgtctgggtggtcaagtgccagccagacacagcattggtctcagttctcaccatgagcctctcacagtgtctcttttctcgatgggtaaataccgggagttcttctctgtacagtcactttatcttccatccatcaagttgggcactgtgtctcagactaggccaagaagtctacaaagacttcgggtcttttgttctcatgcgccttgaatgggaaaggcagacataaggccatagagaataagaacagaaggactgcatgtatggagggccaggaaaccagaagggtatgaaagggggagcttattggagaagctgggcggattggagaagctgggcggattggagaagctgggcttttggcatgtaagtgtctgtggtaaagctaagatgtgagtgcatggttggcttgagggtgagcctgggacaggggaagggcgtggctgagtagtgctgagtggttggcagggatggagggaggatagcaaacccaggccaggggagagggtcaggagcgcaggggacactctgttgctatatccctggagaaatagggggtcttttctgtgtgttaaggtgcctgttgacctgacctctctgcttgtccagtctccattttattgggaattccacaatggactagaataataatagtccacagtggactagaaggccctggttcacagttttatttttgtttatcctgaataggaaggtgtcttaagacgtcacagctttgtaagcatgttacaactggtccgagtttaacctcccagtctgtgagctggctaacacttactggaccagtactgctttcctcggttcctgtgagtgcctggcagagaggcatacaccagcctgctaggtctttaacccccagatgatttcatagggagtgaaataagatccgttcatgtgcatacttaagttgagaccgatacaaatggatatattgcctgcagttccttttattatgaatactggctgatacttaaatattcttctatcgttgttcgttcgagtgaagcctttcagagtctgtgcgtgtggagagcagctgcagagacctggcactctactttctgtgggactccatccctagaggctttctatatagtaaggcctttatcataaggaaagatggacattttcccttaaaaatacaaacatggcttagtggttccccccctcaacccccaccccgactcctccttccttcacaaataataaaactttggtgcttaatcagggttccagatgtttgtatgtatttatttattcggatatttatagtgtctttgtcaaagcagtttcgcctccctgggtgcattccagaaatgttaaaaacatacatggtaaagccaccaagatcaaagacctgggtcttgtgaactctttgcaagcacattgggtcgggacagtccttaaagcgatttatgttgagaaaacagaatgaaagctctcactgtccacggcgagtcttgtggaatgttctggatggagactgcaggacctggcaggacctggcctgaaggacctgccctgtcgcagactttcccctctgctggtgtgtgtgtgtgtgtgtgtgtgtgtgtgtgtgtgtgtgtgtgtgtgaacattgcttagaagcatcccaacagtgcaggacctgcaccctcctggcatctacagagtcgattctctttctatatgttttgttgttattttgacaaagattctcataatgtagtccagaatggctggaactctctgtgtagcctgggcgggtctataacttgtgatcctctgtctcagactcttagaggctagataagaagcgctcaccatcacaacatcatacccggttttctgtgtgttgctatctatgcccttgctatttcttcctttaaaatagagaaatgaactatcatttcaatcttcttaaatattgatcctgtaggatcttacactgatcactgcaagtatgggttttattgtctctatattttaagagtacgtagtatctacatcggcacgggaagcagtaaggcttcttactgtgagtggttaatggtgctgactagtctctgtaaaggagaaagaccctcaagaaagaagcattagttgagccaggcaggactggttaatggtgctgactagtctctgtaaaggagaaagaccctcaagaaagaagcattagttgagccaggcaggactggttaatggtgctgactagtctctgtaaaggagaaagaccctcaagaaagaagcattagttgagccaggcaggactggttaatggtgctgactagtctctgtaaagaagaaagaccctcaagaaagaagcattagttgagccaggcaggactggttaatggtgctgactagtctctgtaaaggagaaagaccctcaagaaagaagcattagttgagccaggcaggactggttaatggtgctgactagtctctgtaaaggagaaagaccctcaagaaagaagcattagttgagccaggcaggactggttaatggtgctgactagtctctgtaaaggagaaagaccctcaagaaagaagcattagttgagccaggcaggactggttaatggtgctgactagtctctgtaaaggagaaagaccctcaagaaagaagcattagttgagccaggcaggactggttaatggtgctgactagtctctgtaaaggagaaagaccctcaagaaagaagcattagttgagccaggcaggactggttaatggtgctgactagtctctgtaaaggagaaagaccctcaagaaagaagcattagttgagccaggcaggaccagttggtgttctgggtaagagggttttcagtatggatgtcctgcttgggtcgggttccgtatgaacacatagcctcttggcaataacagcagatcacctttgatggctatgaggtgggtacacggcaggcatgttcctggcttctctctggagcctctagcatcttaggtgttggattgaacggttctctcttctgctgtccagtgtgatgcccacccataggtgagagggcagagagtaactgcacccaaactgagttcagtctcagctcagcatctgtcttctccagctttgcgtatttggccagacatgtctagtattcgtttgagacaggctcaccactgaggatgctggctgctagcgtgttacccgacatgtgtagccttacctggattcctttctccagcaatagtgctgagaatgccctttagcaaagctgctggtgccacagaccataatattccctttaaaactggagatgccctttaaatattaataaaatcattttcaccatgaaactttatattaaattagtctgaaaaaaatcatactatggctgatgttttaaacaggtctactctcatcttctgatctcagtcttggaccatagactgggacttaactagaggtaaatgctgcctccctgatggatcatttggaattctctcgggcccaaagactagtcgacatttaaaaataggatttctgcatttttttttaatctataatgttttgggggcttcttgttatagcatattttcctgtaatcacttatggctagtgtttatgaacaataattgaaacttacaaagtaagtgaaaaaagccagactgcatacagttgtcaaaatatcttcttttgctaatatcagtattttctttaactttgttatttatttgtttatttttggtgggtgccagggatgaaactgggcgtgctaagcaagcagtccaccacagagctacatttccagactatcaaattagttagaacctttattagcgtatgaatggcataatggcatcttaacttttacaagaaaattgctagattataattagatcctggaatacagggttcaaggaaagaaacttagttctgaaggtcacatttatttatttatttatttatttatttatttatttatttatttatttattgcgacaggatcgcctgcagcctgcaaggcatcagacttgaagtgcagcttagggtagtccttctgcctccccacaactgctggggctcaatcccagggtcctgggcactgacacagaccgaaccaaaccccaacctctctcgttaactttacaattttactatctttgctcccttctgtggtggtttctaatttgtgaatgaaaaccttttaccagggccacctggcccacctcacgctctgctctcgtcctagcagggtaaataaacagggcgtgaacttggtctggattgagagtcttcctgacctgttgttttattctctgccttttagaagagaatgatgaaggcatgtggtgtgttaacaccagtgccctatcggctggctcctcgtacgggtcctgggtcctgatcctttggaacctggttttggctttaagttcagacttaatagaccacttgcagatactctgacaatgatgattggagttcctttgaggagctcaagcctacctcttcttcctaccatcttgctgcctgggcgccatgtctacctggagcatccatctgtcgctgctcagccagcatcaaggaacttgtcatcacttgagccatgtccttgtatcgatggatgttctgagatatcattttctagcgtaatgtgtggagtgcttccttgctctagatttaagagctgcccgcacccctgcccgtttctcgtcacaggaaacccatctcctacatgtacagaggaagcccgcagttcagccttttctccatcacacacccctccccctttataaaatcctggtatgtctccagcagctctttggctttctgtttttaggtcacagagtcccagtgggaacggaccgttggcgcctcccaaaggctgttaatcatgcttttggttacagagacccactaattactgggttccgactgggctcctgacttgagattgtgttggaaaaataggaggctttcgtgactctatgactgtgtcgatttagccgtgtcactcatggggcgggttctgtttgtgttgatattttgcatcttaacttggtggtgtttgcaaggcacgggaaggcaggcgtgcagcgggccctggagtacggactctgtgatgtgttttcgaggcaggaaaattgctgctgctttgcaacccctgctctgcagcaaaggatgcagaacggagtctcacttgttcttttgtggttcgggcgccactagtgtccttctggtcgctctgccctcagtgggccagccttctttgtctgcctaggtgcagcttgggccttcgttcctgagtctgtgttcttggctatgtttcttttgggtgtctccgcagaaacagaattgataaatcataagagttacggtatgtttcctgttttctggagtcatcacagtatcttacccaccaaatagtctaccaacgttctaatccccacattggcagttcctggcttttaacagtatccttcctctaggctgtgaagtgctgtgcagaagcttttcttcagtcaatagatgatgtggtgcctcttggtgccctcagtgatgggagtgagctaggtcccctgaggcagtgggtctccagcagcaagcgctagggaccctgggttcctttattgggagtgtgtggggtttccgtctcctctcgccacattcccttcccgtgcctttttcttttattgccccatgcttgaaatttagatcaaatgcaaactgtatttagatgtattcacggtctctcaacacctttcctgctttcttttgacaggattgccataagaagtctttttcaagcagtaaattaatttaagtggcatgtaccccacctgaattttcttacgagttggcagtttagataaatggatattataatcgctgagcattctggaccaacaggccagggccagcgtgggagacgctacaatagtgataatattctgtcagtctggggcagggaaggagacagcgagaggaaaaatccagggtgtgttttcttatttgtatttataagatgcctgtggggaatcaggaaatgctgtatggcagtttacatggcacatggtgggagataaggccgaaagcatgctgcctcgcaggcccatggaggagatgcagggcaggccggttaatcgacagctgtgtctgacgatacgcccaccatcaccagcaaagattccctccctgcttaaccccaccatttccttgaagaatgcggtctatttttaatgactttattgatttgacgattggtttacaacgagctgtatttattgctggaacgttcggtccccgtcagcactttaatacacataaatctacttttggcaccactttgatagactgtaaaactgcttatatttgcaggaaaatttgttttgccacggtgtgtttatgttagactcggtgtgaatttttccccctccttgaaatcattttatgtcatagcttagctgagaaatagacacactcggggatgctcacatcaggcactgttgaggcaacataaaacaaattgaggagttcacagccaagaggtcacagtttcagtttcacatggaaggttctctgatgctttaatttttactgtggtgtgaagatgtcacagtgtttgcctcacaatttacacacacacacacacacacacacacacacacatatatatatacacacatatactcatatatatatatgtgtgtgtatatactttatatatttactttttaatatttatattatatatattatattatattatattacatatttaccttatcatatatatgtgtgtgtgtatacatatgataaagtaaatacctagtaagtatatcctatgtttactgttataataatctgtatataatttcagtattttgcacacaagagccagtgaaagggggactgtatttcccattattcagtataagtggagttaaaataaattttctatgagacttcctaactttttcatttaaataatgttatatctaattagctttgatgtgttttaatgaatgcaattttgaggtatgaactcactcacacacacacacacacacacacacacacacacacacatatatattatatgccttttccactaaatttcttagtacatattctcttcttcagtgaacagaactataatttttatttagttagtttttgaaattttaatttaattaacgtatttatttccacgtttttaccagtgggacccaggacctcctccatgtccaaacacactaccactgaattttatttttaccttcacgataaaaccagtgataacctagtgattgattatgcttgggttagactaaggcaaatagatgtgatgtgttgataaatcccccaccaagtggatccctatgcggtattacagcctggaacccactggaatccttgtctacctctgagatcgctaactcagatccaaatatacgatgatgtgcaaaggttctgctttaaataggcagcagcatttgtggccccgagtataggtgagcatgcttccagtcctggggcttccctccacagcagatgcccagcagtggctctctctctgcctgaggctctctccacaggaagaaatgaacttgcagagcagtttaagagtcctgagctgtgctcagcagcctttggcaattatcagccaaactggaagtgggtcggtgggttttcagtggaaactgtgttataatgggacatttaatttcaaagagccttgttgataagggaggcacagggaaccaaaattgtcctatgggtttttggtgggctggcaagttgtgtgggtttgtatagcgggaaatcacttccttctgtggagatggtcccagcttctttgtgtgtgtgtgttgaggagagggggcacggtggacggtggttctgagtctggctttgcgagcacagcatccaggtaggtggagtctgctgtccagctctgcatgcatccagatgggaagagaaacgttgccggctgtcgtgttctgggcggacttgcagacgcctctgggcataggagcagctgaatacatggtgaatcatgcagtcgaacagcctgctaagtgagggagaaaagaatatcacgcacagaggtttgatgtctttttatgggagaacaaaggagtttcgattctttcacgttgagtttagcttagccattgtgtggcaaaggaggtttaatgactcattgtttaactaagggcttgccaagtatttgaccattaaatagtctccagtgtgtagagagttctcctctcacagacttcttacttgactgtgattaattggcatcgaattgttatttaattacctctgcagaaatctaagaacagtttgtgttctgattaagttatttgatgtaataacagctcctcagagctgggaaggtcagcacagcctttgggacaactcgccaccaagatggcccaacttctgttgcctggaactcaacagaggatctccaaagtattaaaaaccgagagtcgcaaaagtagcttttacttaaaatatatgcatgtttgacagttgtgaacttacattgtaagtctgcaaagcttacactggaatttgtgagaagctattaattggctcatgttaaacccttgaagcaagaaggcatggagcctgtcccctcctacagcccaaacacttcacagtgatgcccattggcaacattgagctggagaaggccgccagctggatgcattgagggggagaaacatcggggcttaggtgtggttttggcttaggaatggctgacctagtgatgggggatgaaggccgtccttatgagggtagagtttggagtggcgaggcccacaccatagaagggagacacttgaacctggagaccaggcaaggtggaggaatggaaagaggcagatattgaaagaagaaataatgacatcctgaagcatgcgtggcgtttcagaggagagtacgatgctgttgacgaagtcaagaagcctgagagttgagcaacagtagctacctgctttagaaatccttgaagtcttagactcagctagggatactgaggtggggagaagtttaatgctgggactgggagagacctgggggctggggagggtggtggtattttaatagttcagaattctctgtgaggacagggtgatggtttaactaacacatgtccagagctttccctgacaagataagtaagttaaagccattacagtactgtgtcctattgttgctgcaaagcttatctggacttagaagtaacacagtagtccaagaggctgttctttgtaaacactttctttaaatcctaacaaaggtgtatatatttacggttaacagccaagccagcttggcgtgacatctgttggcaattccctggtattaaaatgatgcgctgaagatagaagtgaagagcagatttgggtgttggttgatgaatttccagcacaccttcagttgttttacatagggcgggtagtgggagggcccattgtcttcaagttccatcatgtcctcacgccaaatgttttgctgtcctattttttttttttgaacgttgcgtgcgctcgtgtaagtgttggaaatggaaagagctgattttgcatgtcaggcggcagctaccagtcagggtaatatcagtgagttggacgctgacctttgtggaagtagaattccttggctccaggagtgcttttggcagctgccgccatcttggtgcagtcacgttcttgagacagatgggtattttcaggcctttgtttttgttctcttaatacccatttttatgaacgaattcatgagcatttggccatgaatgatagtcaaggcatgccccgcttggacaagcaagcagtatgttcctgcagcaggagaggtcaaatggttgtcagcttcctgttttctgagcaacagaagttcttagcttcctgcatggttcacagtctaagaatctcctgtatgcaagttatgtttgagcattttccaacacacaggctttgtagcttttcatcagacctgctttattctatagttccagtctgggagagtcttctagagatctgcgcttcctatatcgtacacagttacgtggttatgtgcaacatggttgaaattcattcattgaagtctctctctctctctctctctctctctctctctctctctcacacacacacacacatgcacaaacacgcacacacaccagagtatttctgactgaaatcctcaagatgaactggacgctgcagcagctggtcttttgggtttagctgttgttccttcacagaattcatgcctgattctgcgatagacaattttggggtgcctcatacttccagtctcaataatatttcgtctcttagccttggcactaatagaatttaattagaatttctcttgtgcttggcagaggagccacaagtggccgacttctgaaggtggtaggccttacagccacagaggcagctcagcgtgtgcatcttattggggcgcttttcaaagaatggcattcttttcttatcttgcatctacctgtgaggccaaagagagcagaagaggaggaagcacttcggctgcttcatgtgtttgttgtgttcattcattgttaatctatttactcaaagtgacttaggtcacttaatattgaggtggagttattttaaatcttttacttcaattgctgttagccaagagagccttcccgaaactcttctgaccaggggtgatagttaaagtatttagcacccgacacagctgccattagtcaatcagagaggggcagaggcgtccacagcagatttgctcataaccattcgtgccagagtaatgcctgcccagcctgacacctctctggctccttcttcctagcaggtgtttaatagagcttgcagagctgttctgtaaagcagcagcagcgagtcatagatgtgttgacaagagcacgccttctgaatccccgtaatactgggtgtgggtccagcttggcgacttagtaacttggagttaatttccttgagttatattcttcatctcaacgtctgagctgccttgtctttaaatggggacagtatcattgttatagtgcagtgactgtgtgtgtatgtcctgttttgcagtctctgaccttcagtgtctggtatgtatgtgatggtgctttagaaactaagagtgagcccaaatgaccataagaaagtctgccatcggtcctgcatggtgagggtgcggtgtgaattggcatgggctccatcagtgcatggtgagggtgcagtgtgaattggcatgggctccatcagtgcatggtgagggcgcagtgtgaattggcatgggctccatcagtgcatggtgagggcgcagtgtgaattggcatgggctccatcagtgcatggtgagggtgcagtgtgaattggcatgggctccatcagtgcatggtgagggtgcagtgtgaattggcatgggctccatcagtgcatggtgagggtgcagtgtgaattggcatgggctccatcagtgcatggtgagggcgcagtgtgaattggcatgggctccatcacagagtcagaggtgggggcgatctcttgggccattttctgtagatccctagcatatgtgtctggagctggcttggaggtagacaatgtcctctcatccaagtgtgccccctcccctggctcttccacgcttcctccttacaggcacagctttcgagaaccatggatagaagtcgaaaatgagatatcttccctactgtagggaatttctggtggagtcctctcagtgcttcatcttttcccactgctgttgcatacccaggactgtctccatcttgacatactataggttgtccatgttctctcatccaggcaaacacttgttggcctttgatctttcccgattttgagttctgaaggagccttttccccagcccggattctgtacaaactactctattctttgtcctcctttctgattctcaagtcttctctctgtgaaacgatcaggctggcaccacttgacccctctctggtcctcagtgttaaagtttctgcattgttgcaatgcgtggtgtattgtccatgctttcttgtttctgcggtggtgtgtgtgtgtgtgtgtgtgtgtgtgtgtgtgtgctgccagcaatgtctttattcacacacagtgctcttcccttgacttcagttttcttttctgaaattttcagttacatatgttacaaccacagtctcaaaatgctatttgtgtaggttctttgcaagactgagagagcgcatttatatagcgtctacaataggatactgtaataattttctgtttttattgtatattggtagtctcttattgtgcctaatttataagcttcttggtgccatgggtcagtgtgtgtttgaaacaacacatagaaggtttgatgctagctgtggtttcaggcttctgtccagtaccttgaaatgcacccatccttgctgacagcctgctaccgtggtgccttgtgtctccttcccggtctgcctttcatccttcacaccttcttacggacgcttccatggtctgtatctgctgtggctcagcacccactacctctctgcctgtaagctgcacccagagcctgtcaccccctctccagctcttccagtctgatctggggatgctgtgctgttagactttctagagagcttgaccaccatcctgcctctgtctgtaggttgttgtacccaaacgcagcctgtggtcagaaatattaaatatagtttgctggaacacagatccatttggtggtagcaatgcaaaggaaatggcaggagtaaccagcttgatgctatgtatgacaacattcccaaccaagaacaactgtcaaggaagatgacaggaaacatgcagaattggaaacagagacctgaaattggcaaacaaaccatttgctgtttgtagcagcagggctttctgtatatatatatatttttttttgtgcacaggaagtatttgtgcacttccagcatgttagccattggtttggacagcaacggagtttcacggaacaaacctaacaaaaagtccacccctctttttgacttatgtgaataataatgaaaagaatccaaagcctttggcttccaagaaactccgaagagaattgtaaggaccaacattgcatgaaggtgatctgagatagaagagatattcttggactaaggccttggcagatggagcccaggcaggattgagacacttctggaaaacatggataaagaacagaggttcagatcagagtgagggtagccaggaggctacctggcatctctgtcttccttctccagtgttcctaaaagtccaatagaactgatatagtaattgagatgcagattaggcaatttcaaatgaaaaacgaagacaggctggtgattatgagaaatcaagataagacaaacgagcctttcatattttcgtactagtgtttgggcaccggtcctaggacagggttcaagaagttgggtgggggtggtcatggatcggtttcaaaggtctatgtttggtcttgccttgttgagtttgaaatgctctgtgaaataaccacgtgttttgagtaaggccaggaagaactgagtaggtaagatttgggatacccaagaaacaggaaacagaaagttaaaaaaaaagaaaaaggaaaaaaaagaaaaagttcggggtgggggaggagacagagagagacacacacacagaggaagaacaaaccagaaaaatgagcacactcgttaagtagctctgtccttggataaagggccagctgaaagaagctatctatcttgaagaacgaggttggtcatgtttctctctactatggcataagatgtccccagaagtctgagcaggtggcccccagccccattgggaagcgctgcagccccttcagcaaggatgactggtccttgtctcctctaacatgagcagtttggtcatagcctgcagacctctttggaaatctctacatgagtgtccaatagataggggaggcctactaagtagaagacaggcagttttaggagattatgggcagaggaggagaagaacctgtgtgtccccattctcatggcctttggtttcacatcattgactgtcactgtgctggtggcctgtttcgacagaaaatgagccagagcggaggacctccagaggagaggacctctccacagctcctgttctgttctcacaccgggttggctgaattttgttttagagagtctaggctgacccacccataaaatggcttccttgtcacccatgagcacagctgtcctggttgccctaatgactcagctgggttctgctcagcgctctctgccttggactgtcatttgcctagccaggagtcattgtacctagaagagtgtcatccatcttgtctgtgctgtgacagatcactctggaggatacgtcgatttagatgccacacctcatgaggccggttcatttgattattcccctctttctccagtctctcggccgtcggctacaggcccataggggaccactctcacttggtgcccagcctgagtgtggcacttctgcctccaatcttttctgctctctgtaggctaccaaccaaacagtccacacacactccacccacccccagtgtgatgtgctagcagtgggactcagggcctcacacgtgccgtggcacagatatcttcttacgatcaagtcaccgagctgttactcgcaaggtcaagtatggtatgaatgagtggtacctaagactgtttgtgtggcagagaagatggcttagaggggaaatgcttaataaataaagtgtgcgtcagggctgaacctcagaagtatcagatttaaaaaaaaaaaaaacaggatataaaagtcaacatagtaattgattatatttatttgagaggtactgtaaaaagacatataaaacagaagggtacgttcatggtgacctgaggctggggattattgtaaatggcaggagacattggggagggggtggtgatgagggaataaaaccattaaacttactttgtgtgaaattacattatttagtaagggtactaagatacactgaattacaaaaaatatacttctgtaaaaaaaaatcagtgttttgatatagaaaaataaaaataatgcctttaaaaaacgagattataaagcagggaggggctgtcctgggtgggcaagtgtttcctgtagcagcatcaggacccacgtggatctccagcaccttcataaaaagcccgatgtggccctggacccctgaaatgctcggagaaaggaagataagtaaggcttgctgaccgcttagtctagatgaattgacatagtctagacttagtgagcgaatctaactcaaaaagtaaggtgaagggtgagaaaggggaacattcatctttacctctgacttccacacatgtatgcacgcttgcacacacacacacacacacacacacacattcacagacactaacatacattcacacatacagacacgctaatgcacacatcattaacacacatacacactaacatacacattaacatacctatacacacatatatacacattcacacattcatacacatattcacatactaacacacacattcacacacacagagattccagctagatgtcggtacttcatataactataagaggaatctgactaagcaagaagtcaggagtctaacaactgtggcagtaataccagaatatattctacaataagttcctaaagtttagtccctcatagctttgtgttttgaaaagaagtttgatgactgtgtctgtgaaattttctctggacagagacagagaagcagagccacttgcaaggacccagtgtgacaatgtggacttcaaggcagcccgcctgtcccagtttctcatactctgtccttgccatgtttcctttcttacaaagcatgtgagctgggaaagtattcagaacaggttagagtctccttgtagataattatttggttcccagacagtgttgcactggccacatctggcttgtggagctggggtagttcctagggatagaatttgtgggtttgaaagggttaaactctcaaagttgtttgtttcccctcggtccgtctgtgcagtatagtgttagggtaataagggatttttctttctttttagatttacatttattccttgtccatagtaatctttcataaaaacaatttcttccaagtgttgcatgtcctttgagagtcactattcagtgtctctgtttctgtctccctctcctctcttcctggtcccccttttccgatccctcttctgtgtttgtgtctcccacgtatggcttttataaatatgtatggacattctaggattctccaatgagggaaaaacatgctgcattcgtctgagtctggcttgctttacataatgtgataattcccagttgtttctgtttcccagcaaactttaacatcgctcttctttatggctgacggaggctccgtctgtgtaataccatcttctttaatcattcatgggttgatgaccacctgggctgattttgtattttatattttggcttttgtgaatgctgaggccagagtcatgggtatgcaggtatctgaagtgttgaggcagtgtctttggttgtattatgtaggagtggtgccttaggtcacatgggaaggctggttttggttttaagaggcacctccatgctgattttcataatagcgaaatcagtttatattcctgccagcaatgcataatgctgtcttcccagtatctgacaccttaaccagcgttttctcctgatgataagtctgagtagaacctcaatgtattctaattttcattttctctgcagctgaacagtttggactttttcatgttttctggccatttgtatttcgtaatttaacaaccatctattatattgtcttattggtgctttactgttacttcttgtgtattgtacatgtttatgtgtgtgtgcacatgtgcacaggtgtgcgtgtattgcatacatgtgtgtggatgccagaggtcaatgctgtttgtcatcatcattattattttattattattaattatttgagacaaggtctctgacttagcttgaagctcgtcaattcagctagcttggctggtgagtgagccccatcagtcctcttttctttgctccctagtgctgataagcacttgctgttgagcctgtatttttatgagatctggggaccttaggtctgagctcaggtcctcacgcttgcatggaagagcactttaccggaagaaccgtctcctcacctcctggctgtttgatgggcttgtttgcttcttttggtatttgggggttttgttgttgttttttttagttatttatatattctagatgttaatcctctgtcctaacatactttagagcagtgggtcccaaccttcctaacgctgcaaccctttaatacagttcctcgtgctgtggtgacccccaactatgaaacttttcatcgctacttcctaactgcagttttgctgctgttacgaatcatagtgtaaatacctcgtgtgcaggatccctgacgtgcgaccaccaagagggtcaggatccacaggttgagaaccattgctttagcacagcgtggtaccgggaagagcggatatccacatataaatgaaggagcagtcctggtctccacttttcgtgaaaacaaacaaacaaacaaaaaaaacccaacaacaacaaaaaaaacacttcagaagacttcatccaggctcaaatctgataaaagaaggggagggcttggcttctagatgtaggcacagctacaggctctctggaaaacaactgctgtgtctcaggaaacaacacaagaattgacaaataggattgcacagcgaaggaaatcaatactcaccagaaaggaagaaaattgttgacccagattcttttgtttgtttgtttgtttgtttttaaaatatgttatggtatctggcctctagctctgggcaaggtgaatatgaagaacctggggctctgcttcacacagagccttgcaagcaatccctaggggtcagctttgagtcctgttcactggctctacaagagaccgggccatctcagtgcgtgcagagaccgtggtggagggaggacccaggtatccgagagatgcccgtagcattaacaggttccttgtgagaagtctggacaggctgtgactaggtgtgtgtgtgcgggggaggggggctgtcatggcaagtgagcttagcggttctgagggcagaaaagacacagtagcctttgggtgttctagaaggcaagattcagcttaacgtccgccaaatgctctaatggagcagtttgcttggactgggttcccccgggaaacttgctcccctccccgctcgcctcccctgagacattcctgtggggaccacatgtcatcgggatgaagaggcagagtatggggggactcatcataaggatttgatttggagacttctgagcaagtgactctgaggcctcgagctctgcctcacagacccgaattcaacattgactgtaaggcagaaacatctcccgcaagcactgtttcttctctcacgagtttcttaaaagttaccctgagcccctcttgtctcatgttttctgtggacactggtggataagagtgagggctatgggggaatctttgacacgtagttttgtggtacctgttgtgagtgtctgtgtgcacagcggcggatagaacaagacctctggcgtcttcctgttccactcttggcgttattgccttgagatgtggtctctcactgaaccagaacattgcaggttgggcccggctggcccaagcttctgggatctctcctctaagacatacctagctttctagttgggtatcagggattccagctcaggccctttggaagctggatgaagatggctttttcttagtgtttttctcagacctgaagattcttgaatccagtaaaacgtaaaggagtggtttgggggctggagagatggctcaggggttaagagcactgactgctcttccagaggtcctgagttcaatccccagcaatcacatggtggcttacaaccatctgtaacggggatccaataccctgttctggtctgtctgaagtcagctacagggtaatcatataaataaaataaataaatccttaaaggaaaaaggagtgcttttcacataagaatcacctctagtaagccatttcatcaacactgcttttaaagctgaatcgggtatccgttatgtctggatcttgcccatgtttaaaggtgtaactctccccctcgtttttaccatgtatttagtgatttgagttcactttggtttgtgtgtctttaagatggggtctctcactgaaccagaacattgcagtttagcctaggctgtctgtctggccccctcagacactcctggctttctgcctgggtaccagggattctactccaggaccttacacttgccgagctaatgctcttacccactgacctgtagttttcttcattggtattgtttctttgtgaacttaagaattagttcatacaacccatagactatataggggaaatttgactatgtgtagttttctcagctgtatctgatttgagctagtcaatctctctcccctccaggcctggtctagggaagagtagacagggcatccttgggaattcttgggcacttagacttaagttagactccgcccgcagctgttggaccagaatccacagtttaatagctgaacatcctctccctctggtatgcttcagagtctggctaacagttactatctcagcttttggggtttttttgttttgttttgttttgttttgttttgttttttgagctcttgttaaaaagtgcctggcatcctgacaggattccttcgtacaatgggctcatttaaccctcaggatgaggctctaaaggaggtgttagtaaaacttaagaagagttgtcgatgagcctgccaaagatgtcatgaaagacactttttggagtctgcatgtcctgagctggagacaggacagctgaggcctgcttgtctccggtatgcacacccgtgtgctttctggtagaacctaggtgccctggaaggattacatttgtaccatgggctaccaaagcatcagccagaaaattgctcagggagttgcccgcctcaaagtagactatctatctatctatctatctatctatctatctacctacctatgaatatatgtatgtatcatccatcatcaatctgtcttatctatcatctatctatctatctatctatctcttatctgtctctgtaaaacacgtttgctagaaaccagttttgactggtcccctctgaagccttcagcactccccgttttcttgggctcatcttcaagggcagtgcagtgggtggtagtgactgaccttggttgtggatcactgcttctgtttccctgtctgcttccctcttgtctccccttcctgctcaagcctgtggctgtcagcctggacacccatgtgacaggaatgtcatggacactggtgggagtgttctcctcagtgggcagcgtcttgagtttcccagggtctgatgaaccatctctaagggtagaacactggtactgtcatgtacatctagaaaaattaattgttaagattaaagaaaaatttacatggcaattagaattcattaaactttgtgtttggccattttccgtctttcttctttgtacttggattgacctagatgagacctaaaagtcaagggacatgcttaaaccgacccaactctgtcatgggcttttcccatttcctctgtgtgtgtgtgtgtgtgtgtgtgtgtgtatacatataaatatgtatgttttaaaatgagggccacattgcagttctctgtccggcatcattcagtagtatttttattttctttaggtatcactctgtgttctttctttccgttgccattgacatgggcttattttgtatgaatgcatgatatattaaacacatatgcatttaaaatattgtttcggtttgtttgcaagttatctctctccggggtctgtctggagagatgcgtaatttcttgcgttctgtgcttgcagggaggattttaaatcgtttctccaaagacatcggacacatggatgacttgctccccctgacgttcctggacttcatccaggtacgtcacgcactcagatgcagaacggtgcctttttctttcattccctttctgcttttcaaggcctttccgtgagcgtttggggtggccatgggctgggggtgcgtgatgttacctcaacaaaaggccgtgtttgtagaagaaaggtgtggctatgttttggaggctaacttagcgtgagtaatgttctgtgtaggagtggccgtgcgtttgtgtcagggttggttcacggcagctacacgctggtaagtggcgtcccatctgcctcccaggtatctggcacggattcgacttactgtgaacacatttcataatacagaaacaatcacctctcacggaaagatagcccagattaacaaaattatgcattgtattgccacaaagggcaaatatttactgcactgttgttttgttttgttttgttttgtttttgaagggggtggggtaaaaccaggtgtggttacttacaaagaacagattagcaataataaggtgaaaataatactttgttagcaaggacaatagagactgcttattgcagattcagagctttaaatgcaggcgtgtttaagccaataataggagtacgggatcaaactcttgtcagaaaatgtctgtttttgtttttttggcagcctttcttttcacacgttgattgctctgtcttaaggtgtcttttgaaaacaggatcccacagaaacgcctgcttttagcatgttgtttttgtctgtgaacttgagggccaagggaatcatgttgggtcacctgtctctcatctcctccttcagtgttggtgctcctgcggtttgatttgttttgttttgctttcttctctcatttaattctgtctacttttcagtgactcaggcaggggatcttttttgtttcccccctgagcgtttattttggagaagaaatgcatctctcaaaagctgtgcgggttttagaatcccagaggcctgaggctcacttaccgtgagattgaagccctttccctcctaaccaccggtttctccccggaagccaagctgcaggccggaagtgcaatgggcacaggggattcagttgtgcccgagtctcgcaggacccctggggtccacagttgagccggaatccctgttagtcacacaggaagggagcccaggctgtctgactgcaaacggcatgacccataggtgaagacctctcctccttacacccacccagggcccacaggcggagtctgcaccgcagatgagcgctccagactcttttggttctgcgaacttatttttaaaatgtttcccactggctttggctacgctcttatcctccggaagcaaccttttgctgcagagccctcccgccccgtggaagacagataacattaagcccatgttttgacagcgattattaattacttctagaagaattagcacaagggctctctccacagcagcgagccaggccgaggctgagtttcccaagccggccggcccgccgccgtgcgtttagcagagtgtgatccctgctaattagaatcccttatgtgttttcctagcgcctatggaggggcgatacttgacgggtgctccttgatttcagtacaaagcattctccgcattgtgaggagagaaaattctagcctcgtacttcagtttaaccagatcccagggtctttattcatcccccacccaaacactcttggcacacttagccgccgttgactacctctggttccgggtagccggtttctagaatcctagaagaggttcatcttgacgctcgctgttgcccctccccagaaggagttttacgtgaaggatagctcacttatcaagcacggttcagctctgttgtcgatcacctcgtttgcaggtgtctttaataagccttcccataatcctttcaggaagaaatattttctccttttaaaaatagtattagctaaatataaaagcactgatctcctgccattgtcgtggggttctctgagggacatttcccaacattcgttgtttaaatggttgtcaagaggaatcaagtgaaacttagtaaacagagccgctccctcggactgtgtgcgcagccttggctgtggcagatttgcatctgatggctgagtgggcttctcactgaggaatcgctggcatggttttgaagtatttggtgcctgttgctttatgacagagcaaagattttctttcttttttttttttttatgagaggcacacacacacaaaaatgaatttaacctgcccttaaagaaaggccaacaaaaaaatttaaatgtaattcctccccccttccccctttttaaagtaggctagggctctgtcaggacaaaaacaacccagtggtgttctgagactcttaatggaatcatgtaaacttaaaataaacactattatggtaagcacatagaatgaaaactaattttccaaatcaaatacattatattcaattcattttccccaatcaaccaaatgtttaaaacctgttagttataacagcaatctcctggaaattaattagaagcctattagctctgctagctcaggcggacggcagggcttgctccttacatgaataagtagtctctggaattaaagtgtagcaaggtcacagtgactgtcccatgggctcacctagtgcacggacttagtacttgatattttttggtgtgtgtcggggggggggggcgagtttggcagggggtgctttgcttttcaaaaaattttgtctactctaatttggtcttttaatacattgaaaaaaaaacatttggactaaaaatgtagctcttctgaccttatctcatttctaagaccgtggttctattcccagtaccactaaaacaaacaaacaaacaggcagacagtcaaacaaaagggccaatgatagtaacgacagaaatgtgagaattagccatcagataaaaccattcaggtcacgagaccctgctgtcattagcagcaccagctttctagtgtggatctctgaagtgggtggaattcttcccagtccctgtttactagtgcatgctccctgaagggttttcttagctcctttcaagactgaccttagtagcaaacttcctgtctgcctttgctcataatgccatcagcaaaccctgctgctgacatcaggaagtcaccagccagctcctactatgtgcagggaatttcccaggatgcttggctcagcttgtctggaccagttaagtgcagctggatccgatcctcagggaagcgagcattcatcctgcatctccatcgaacatggcagcgtgcagaccagcaggcagagcagaaaccagagctcacagctgaagtggtagaaagcaaaagacaaagacttctgggctcctggttctttctataaaagccgtgcttatgggcatgcttttctggataaggaagattggatggctgtagaaggaaacaatgtaatcacagttacccccatgagctgtttaatccagagcatgcatgcctgcttcatcgccttttctgaaaggcgaaggcagtttagttagttttgtaagtcagtccagaacttgagtatgtaattctgaggaattgaggggattgggccgaggacaggacccttcatttgtggcattgtacctagagcccctatgttctgagtcgggacaaaagttgggacagaggtctgtcaagataccagtgggatgaaggaagttttgtttaaaatgtggacaaatgtcctgccacatagaagtctaattttgtcccttaggcttcaacaaaaggttgatatttctgtgaacatggatggggtatgttttaaagtactaactgttggtgttggtggtaacggggcacaatgcagtgacagttttcaaagtcctcatcgttgattgctgttgtgaatcactgtgagaggttctcatggaacagggtaagaagagtctgggagactgggcctcggtgggcatgagtggatcgttagtgactaaagatagattactgacaggctgctgcaaggggtggaacagcactgaagggtgttctgaataaaatataaatatatgactggaaataataacataaaatgccaagttatattggagttgccggtggctcacattatacctctggcttaaaaagtgttgttgttctaatgtgttttgtttcttggccttttcaagaattgcaagcactgagagagagagagagagagagagagagagagagagagagagagagaatggctgtatatattagtatatgtatgcatatgttatatacatgtgtacataaggattgaggaagatgcccaacactaacctctcatcttcacacacaagcgcacataggtatatacacacctgcacacatgttcagttgaggctgtccaaagttcatcatagctcattaagtgaagcctaccctgcagttttagggaatataaagatgtgtcatgtttacatttctctgctctgaagacactgtcattctgggctcatgggcttttctcctcctaagacacaggaccgctgatctggtttgcacacatgatgtgcttgctttccatgcttgctttctctgcaaacctgaagaaatctcagcagataaaaattcccttatgctgcactgatgttctcttaagggatacatcactacctgaaggatgtggctgggcaggcctggatgctgtgatgcagtgagggatgggcaggccaggatgctgaatgcagtgaggaatgggcaggccaggatgctgtgatgcagtgaggggtgcagcaggccaggatgctgtgatacagtgagggatgcagcagcccaggatgctgtgatgcagtgagggatgggcaggccaggatgctgtgatacagtgagggatgggcagcccaggatgctgtgatgcagtgggggatgcagcagtccaggatgctgtgatacagtgagggatgcagcagcccaggatgctgtgatgcagtgggggatgcagtaggccaggatactgtgatacagtgagggatgcagcaggctaggatgctgtgatgcagtgagggatgggcaggcctggatgctgatagcagtgagggatgcagcagcccaggatgctgtgatgcagtgagggatgcagcaggccaggatgctgtgatacagtgagggatgggcagcccaggatgctgtgatgcagtgagggatgggcaggcctggatgctaaatgcagtgagggatgggcaggcctggatgctatgatgcagtgagggatgcagcaggccaggatgctgtgatgcagtgagggatgggcaggccaggatgctgaatgcagtgagggatgggcaggcctggatgctgaatgcagtgagggatgcagcaggccaggatgctgtgatacagtgagggatgcagcaggccaggatgctgtgatacagtgagggatgcagcaggctaggatgctgtgatgcagtgagggatgcagcaggccaggatgctgtgatacagtgagggatacagcaggctagagtgctgttatgcagtgagggatgggcaggcctggatgctgaatgcagtgagggatgggcagcccaggatgctgtgatgcagtgagggatgggcagcccaggatgctgtgatgcagtgggggatgcagcaggccaggatgctgtgatacagtgagggatacagcaggctagagtgctgtgatgcagtgagggatgggcaggcctggatgctgaatgcagtgagggatgggcagcccaggatgctgtgatgcagtgagggatgcagcaagccaggatgctgtgatacagtgagggatgggcagcccaggatgctgtgatgcagtgggggatgaagcagtccaggatgctgtgatacagtgagggatgcagcaggctaggatgctgtgatacagtgagggatgggcaggcctggatgctgaatgcagtgagggatgggcagcccaggatgctgtgatgtagtgagggatgggtaggccaggatgctgtgatgcagtgggggatgcagcaggccaggatgcagtgatgcagtgagggatgcagcaggccaggatgctgtgatgcagtgagggatgcagcaggcaagatgctgtgatgcagtgagggatgcagcagtctaggatgctgtgatgcagtgaggaatgcagcaggccaggatgctgtgatgcagtgagggatgggcagcccaggatgctgtgatgcagtgagggatgcagcaggccaggatgctgtgatgcagtgagggatgggcagacctggatgctgtgatgcagtgagggatgggcagacctggatgctgtgatgcagtgagggatgcagcaggccaggatactgtgatgcacagtgagggatgcagcagactaggatgctgtgatgcagtgaggaatctcctgagttcattgttctcttatcccatttccattcagtatcctacagtgccctggcctctgggtctgtgcaccatccctgtgcacagaagtggtctgatggtgtctgagcagtgcattttactctgagagactcatgactttcagagttgtggataaggtgaggatgaacagtggtgtcactaacagaaccttctacccctttgagtgaagccattaatttgggaaccctgagggctgaatgtggcctagctggtctgctcctgcttgactggtacattgtgtttgccctcctgtctcttaaaagcacaccatttgcaaagctagtaagtggtctgccctccgttgctggcgctctgccccatagtcaccgcatgcatcctactaaattttctcaggatgcttgtcattgtaacttaatgatgacattcttaccaacaaaactgataccatataacaaggagcttgataggctgaaagctttgaaatgactcactaaccacttctcttaagactaggtgccgtggtgcacacatatagccccagccagcactgggaggctgaggaggctgtcctgaccacctagccagagttggatcccaaccccccccccaaaatactcagttaaatgctcttctccccccacccttggtagtaaattaggtttccgtgctgtctttgttactaggttactgcagtgaagaaatacatgaccaaggcagcttatagaagaaagcatgtaactagggacttgcttacagctttagagagtcagtttatgaccagcatgacagaccagagcagggagcagggcagcaggcaggcatggggctagagcagtagctgaaagctcacatctgatctgaaagttggagggagagagacagaaagacagagagcctgggcctggcgtgggactttgaaacagcaaaccctcatgtttccaacaaatgtcttatcgtctgtcctaaacagttcaccaactgggaaccaaacattccaatatatgagcctatggaggccattctcacttaaaccaccacaggtctgaagagtaggtgggggaggggatgtcctggaggaatacacggagaccctccttcccagtgtcttgagagttgttgaagactcgttatttataagacttttcaggaggaagaagcaggtatagctcaatgaatccaaggcttgctctaggttgtaagttctacattgtacatgttttaaaattaagactaagctgcagggaattatttccgacctgccttacattcgtaggtcatagctttcaggattctattgcatcctgcctggaggaactggacaaagttttgtgggggatagtctctgaaccctaggaagtagagaaggcacacttgtcaagactcccagggtgtgtgatgtttgtaatgagactatgttgtggaataataatagcacaaggtgttgagacaaggcttcagacaagacaaaggcagtggggacagatcctggagagacggtgtcctgagaaccagcccttaacgttgtagtagttggtaggatacggagaagagggcaccgaaagcagaggactggcccagcacagaggcagagggtcagtgatttaaacacggagcatctatgtaagaatgcgatggttaagacaaatcctgactctcactctgtggtgcagaacggttcatccctcagggatgcgtccatcacaagccatttctgttttaggcagtaggttctcaggtatcccaggacggccttgaactcactacatagcgaaggatgaccttgcactctgatcctcttgtcttcccaagttctgggatgaggaggcctatgcctccatgcccaatttacatggtgttgggagttgaacctagagctttgcatgtgctagaccagctctaccaccggaactacttccttaccccataggtaaccctgaaggccaccagatgtggctgtttcattacatcgtaggagctggagaaactgagctgccctccgctctagatgaggacagactgtttaaaaagctaatgtgtggattctctcctgtgtcttcctacctgaggtcacagagcccttaaaaaatcacttcagtccgtgctcttgcttcttcaggaaaagccttaagtttacgtgctgtggagtgactgtgtgtgacagagtggcacttaaagcataagggtcacatgtcatgtgtgatagcattggggagtctggcaaccttcctttctaattcactaagccttaccactgaccctctctatcctcacagagctacattctgtgcatgctcacagagctacattctgtgcatgctcacagagctacattctgtgcatgcttacagagctacgttccagacattgctgacagagatacatagtatagagcggtaaagatggaagaaaagcgcctacctcatatggagtgcaggagagagggttgccagcgtgccagcaaaattctcttccttcagtttagttttgttttagaagtaagattctgatacattgtataggctgtctcggaattcttgggctcaaataacctttctacctcattttctcaagcagatagagttgcggatagagtgataggtctttggctgaacacccccgggaccctgtcccctacacggcccactgccccccccccccccagatctggggatctaatccagagctgggcacctgccccaccactgagccacaccccctcccctcagtgacactccagcaaaactcatttaagtaacaaaggatatgcttcttttaaaatataatattatctctaagcgagacaaataaattggtaacagtgatcatcgtctgctctcttgtgttccattgaggtaactgtctgacacagaccagacccaagtcccagctcgtgagcttgtatggaagatgttgggtttgtgagtgcttatcattttagtggctatttcccattctgtgccacatgatcagggtctgttgttttcagaacagatcattgagcagtaaatatttcatactaatgtaatctctggactattcccaaagcttccgtggtccccagtagcatcgagcaaagtgtctcacttatctggaattctggcagctaacatgcccacttccgaacaaagcaattgaaaatgtagtgacttgtcattatttagtggggttgaggggggagtgtacttctgagtgtgcaaacttgcacacagctgcgttctgcaaaacgctgccaatgatttagagcttcgttgcaaagccattcttcttcacttcacatcctcatcagaaagaaagagagagagagagagagagagagagagagagagagaaagaaagaaagaaagaaagaaagaaagaaagaaagaaagaaagaaagagaaaaagaaagaaagagagaaagggagaaagggagaaagggagaaaaaagagaaaaagaaagcaggccaacaacttgactgagcttaaataactgacttttcctaccctttcatggcacacaaaggactaatcctaaggctactctagccaccagtgcgggcagtagtggagactaccactgaacacagacacattgacttctgctttatgaagtgaaaatgccaagccaaaggacgcgaaggagccgtccccagtcccttcttcctgggggtgcaggatgagcaaaagctactgcatctggatatggggaacaaagccagcctaggacttggggataataggctgggtcactggcttttatagaagcccaggggtggaactgcccggacttgtctggtcccactgacccttgcacggctttgtgtggagatgtcaggggaagtgtgtagaaagcacccaggacaatgacttcgtcattctgagatttctatggtttgctcggcctactcccaccttccaattcctctcagacaaaggacggtgttaggtaggttgcctcaccctggttttcaaagatctcattctttaaaagtaaactcatccattttttaaccgaatcagagtgtttttcatgcttttggaaatcaacaaaagaggttttacttggtgcatttgcaaggagggaataattaatcacctggaaatgccagcctcagagatagcactgtgccagctgcctgactgaggtgtgccccctgatcgtagacagtcgagctgacgatagcagatactggcaatattgaccaacacataacccaggcagcccatgtgattggttggtatcgttcatgaggccccctgactactattcctggaagaggagaagtttgggatttttgccagtcagagagttagcaccacacttggtagtgtggtgacagtcactggggattctcccaggcttgtaggcaatttgtcccagcatgtgtgctctggcgataatggttgtagtttagcaagaaggcaatgaagacgtaaagagcaaaaaaacaaaacaaaacaaaacaaaacaaaacaaaaaacaaaaacaaacaacaacaacaaaagtgaacaattttgttttttaaatcaagcctggtggtgttctacaggagcacaaaactttataagctaacatggctgggtggtgtgtgtggtcaaagaatagaggtcttcactgtgcctccgcacccccacccccgtgggctctcccaccgtcagccatcctacacagttgttaaggcagagagtaaagtggtggagacttctagagttccattatctcgctgttcttgcttgtatccatttttgtccgtgttctggtgttctggttgcttcaattttattaaaatcgcacacttcctattttatgttttttttttttttttaagatttatgtatgagtacactgtggctctcttcagacacaccagaagagggcatcggatcccattatgaatggttgggaaccaccatgtgggtgctgggaattgaactcaggacctctggaagagcagtcagtgctcttaaccactgagccatctctccagcccaggattttgttgtcgttgttgtttgtctacacttattgcatgtgtgtgcaggagcatgcttgtgaaaatcagctctctcttctgccatgtaggttccggagaagaaatggaggttttcaggctcggcagcacacgctgcaccccattagctgtctcgctggcctgagcactttgctttgtacatacactgtgtctttctaatcccatctggatcatggttcatcatcatcagtcctgtcctggagtctctcctgtttctgaatttcacaacccacttgttcctccaagccgtttctctggctcctgatgggggattcgctgagggtctgaatccagcctagaagtagacggtacggcctctaccttgtggtgcagggttcagaccccctgagagaggtcacccaggccttgggagctatgtgtgttctgagacacatttccagtcttctagtcacatctagaaatgatgtctagtcttcacatgggtcctcttccctcctctagaagcacccagtataaatccttcttgacactgtgactctataaaattttcagcacatgcctgcacataggtgggagtggaaccctggtgacatagttttctgtggttgaattcctttgattatttaggtctcattccatgagtgtttcagtgatgaattttgtccatttattctccatctacccctccgcattccttcattctcccaccaccgccaccgagagatgacgctgtattggaagatagcatattttattcatctgttggttgatggatatttggattgttgtcgcgttttgtgaccaaccctccttgtatcagtatttatgtgccacgtatattttcattcccttgagatgaaaatgccttgggtgggatttctgtgcttcgggtaggtgtatgtttactaagaaaaaaagaaaacctaccaaaaagttttcacagtgccattctactcacacatcgcatgcacagtgactgggggcgctctgcctttggtaacgcatggggcttagtgttaccagttctcttgatcggagcctttactgtaggtatggctggtctcgctatggttttagcttgggtttccctgatgattagcgatgctgcacctttttttttttttggtgcacatttatcagccactcggaacttttctgtgtgtgtgtgtgtgaattttttggttcaaatctcttgcttattctttgtaaatttattcttaaaaatcttgttacaggttgatttattggaatgcgtgtatgtttaattctaataatttctcccctcaccccccacccccgagtttgtgattttcttttctttgtttttttaacagtatcttttggccagtaggctctaactttgatggagtctaataatgacctttttttcttttgtgtatttcacagttatttttgtgtgtcctaagccgtatggaggtacttcatttttttattggtgtgcttatgtctgtacacacatacatgtgcgcgtatgattgaagatggagtccagtgtcgacgcttctttctcagtcactgcccacccttctttctggcatatgtgtttatgtgtaggatgtatgtgtatgtattcgaatgtgggcacatgagtgtacgtgtgtgcatatatgtatgcacgtgcctctggataccagaggctgatgtcatgtcttctttgactactgtcttccttacacgtaccggcagggtctattcattgaacccaaagctgacctcttgagccggtctagcctccaacaggttagaaatccaggcccatcaccaggccctcctggcattgatgcaagcattgaaagggtagccctgacgtggcgcagcatactctttagtcactgagccatctcctcagccctccatcttgtctttactctcagtgagtctagagctttccaattcggctagactgactggccagcgatctctcagcagccccctgtctcttcctccctggcacggggagctgttacgtgcacactgctatggtcacctttttatgctgcttctgggacactgaactccctcttcacacagcgtggcaggtgattcacctcttgagatatctgttcacctttctttggtttttccagagaacgtctcgatgcgtggccctgcttggcctggaacttgctatgcagactaaggggctggggttgtgaccgagtcccgctaccccagcgataccctgctcaatctttgtccacattttcaaaggcctcgtgtgttttcacgtactttgggtgtatggaaggagtgcttgctgtttgaggcttctctctcctttaatttccccccctgtgtgcattcacggtcttgatgtcttggctgcctgcatgtgggctccggttgcctgtgtccttccgcacacgatctctctattctttcacggatactacagtggcttggctattgttcattttagaaagacttggagcccagtagcagtttgatccttcccactttgtctctcctctgttaaatctcttttatttaagttctaaattcaccttacctttttgttgttgttgttgtttttataaaagccttacttgttttggttaatattgtccttaattgttcttaccctcaatgtagaaggtcattggtatatctgtggttaactcaactttatatctgttgttcaacaaagatttggggctctcctttgcagctcttgtgatattttgtaaacatttggtgttagagttatactgacctcatgaaaataaaagagttggcaagggatttctgtctgtggtagttagtgttatgtgtcaacttggtcagattaaggttcccaacccaaatagtttactcaaacagaaaccaaggtgttgattgaaaggtattttgaaaatgtgattactggtttataattggttggcttcaagtaagtgaggtcatatcaggtcgtgtggattaaaaggtcttaagagcagaggcagaagaaactatggctgcggctgacagctttccccgcctttcagatcctgaacttgcctcacctgccctgagtcacaggggccaatgaatgatgatcaccaccagtgatcttctcaaaatgtttgtcttgagctatttgtatttctctacagtcctcttccttttcttttgcagggggttgggaggtttgaaacaggatctcactgtgtgactgtggctgacctgaattccctgtgtagaccagactggcttccaacccacagacacccacctgcctcagcctcggagtgctggtattaaagcaatgcacctccacacccagctgtcagtcctcttttctaaaagaaaaccaaaacttttctaggattggcatttttttttctctcctaagtatttcatagaatttactagtgaagtgctatcacccaagagtggagcactagagtccaagagtggaggactatagcccaaagtggaacagtatagcttaagagtggagcaccataatacaagagcggagtaccatagtttaagagtggagcacttataagccaagaactttgacgagtcactaaattcctttcagactatgaattctgattctcaaacagacattgagctgctccggttgctatttcttgtaatataacctttcgccaccatttctcaagacataagctgtctcatcaaacatgttaactctgtgtgtctagtcagcccttttgatgcccatcttgcctcttgtgatgggggcaattctcctttcttcactggcctttgaagcttactaatttggtagtgttttgaaagacccacagtttgttgtttttctatctaattaatatttttttttcattctcttttatgctgtcctttttatggcctctcattatatagccttgattggcctggagctccctgtgtagatgaagctggcctcagacttacagcaatccttctgtctctgccttccaggtaatgtctttaccggcctgagctagtgtggctgcttcgtttcttttctttttttttcttttttcccttttggttgttatttctgcttatttgttctcatatcctcctttaaactctctttatgcttatgtgtatgagtatcttgtctacacatgtatgtgcaccaaaaaatgtgctcgatgcatgaagcagccagaagcgagtgccagatgccccggagctggggcaatggatggccatgagctaccatgtgggtggtgggattggacccttgtcctctgaaagcagtgagttctcttaaccactgagccctctctccactctctttttgcatcctaaaatctggttttagacctttgacacttagacttttctgttttaaaaagttaaagctgtacatacatttacctctaaacatggcattagctgcaactcccaagttttgatagtatctggttttcatactttttttttttttacaaaacacttccattttaatgtgtttttgtaaacccagtattatttagatctgtatagtggaattcctgatagccatttttctagttttcttgtttttgtgatgtcgttaaatccgctaaaaccaaatccgttcttgttgtcgaggcgtgtggacgcgtgttttgtggcatagtggatttgtgctggaaaggaattgtccttgtcaccatagccgttggctaacatttgctcgttcgctcatcacgaagtcctgtgttcctgccagttctttgttagttgttctatcagttgttggagtgagcatggcctgctttggtgccatgtgactgtgactgggtttgcctgttagttctaagtatggtcagattttcctttaatattctgaagccgtagttgaggttcatacaagctggtttgtgtttctggataatggacccagtttttcttggacttatgaaggtgtgtgtgtgtgtgtgtgtgtgtgtgtgtgtgtgtgtgtgtgtgtatgtgtgtgctgtgggactctgggcacctgtgagtgtagatgcctgtggaggccagaatgggggcgtcagatcccctggagctagagttccagaggctcattggagctgtcctcctggagagcagaaagtgctctcgtttcctgagccatctctccagccccctgacccttcttttctgatgaaatgtttccctttatgagctttggtgtttgcagtgctagtgacactttgtttctgttcaaagtgtttagcatcgaatacctttattttaacttgtacccaaagtgtagcatcgtttctgcaggttgagtgagctttgtaacaagcattaacccctgaaagaggaaacttgtcacaagcagacagattccagcacttaactttgacttccagtccagagctcatagatgggagacatgggacccagagtagctgtggatatgaaatggtcacgtcagccatgtggcaagtggtcagagcggtgactgtctgcagatttaaaatcttaagagaggattatatacaatgctgcacacaaacccatcatgccagtatgccttaaagctctgacttaccagagatgacgagttagcagagctcagaaggcaagtataagtgaagagacccccagagtggtagactagacctgtagacatggtcagtgtttaatgggtgtggtcttatgtgcaaagctctcagcatgccccctttgcctgcacataccctgtaggtggagggtggtgagtctaatctgataggtgttacacttacttcttagtgctttccaaagcctacttactcttcagacttttaacgccctccgggaatcccatgtcacctggcagcgtaatttgttatgttccttttccactctgagatcagtttcttttatctcacgtgttcccaaaatagtagataaaagagctccttttatacatccatccatcagtaaacagcttactgatcaaaacctcgtcatcatttctccctcgctaaatcagaggaaaatcttggcgagaggtgagtcctgctttgcttacgggtagcactagagccgtatctggcaagatcagccagggtggaaggcaatgcaggcaccgcacactctggcaacttggaatggattcctcggtctcactgatggctgaagtcaaagctttccgcttgcaccgaggtgtgatccgtttgaggctgattttattcttgataccgcaaacgaatagtagaaaatgcctggtgcagattgagtggcccttttgagtagacatgcctttttcctctgtgcttgagacaggtaagagacagttcacgtaaggagtgaagtgagccaaatgtatacataggaggatggcacacacaaaattagactgcagctttgctactgtttataggaaacatactcttttggcacctgcatcctctagaccagtggcaagacatctctttggagttaagtttaaagtaaactgcaggtggatgcctaggaccgcccccccagaactgagagcagctgtggtgttaaataccagaaacccgaataggtccttgaaattaaaagtgttcctatgaagaaaatgcatttaaaacctgtattattaaagtgtgatttctgaggaaatcactttattctagttctagttttactttttgttctcgttctttgcttatagaggcaagctctatataaatacctcaggatggcccggaaatcactttgtagcccaggctggctcaactctgtagtgactctcctgcctcaacctgccaagggctaaggttgctcttatgcattaccacacccagtcttgagggaacgtcatcctggggaggttctgtgggctttagccctgtgagtgtaagtccacagaatgtaagcagccaactttcacatttcaccccaacagtttacggtttcgttaaaattaagttcactatttccccataagccatgttgctttgaaagattaaaagccgtttttcttaggaaattttgtattttaacttaaacaatatttgctcagtgagcaagaattggtatactgtgttagctagcatctttgaactttttaaactttcactggttcatgagctgggtagggggttaatctctatcagcctgggcaagcaccagccaccttgtggattaggctggtttaaccttaagaaaccaaccaggtttccttggctctatgaagactcgatagaagccccagtgtaggggaatcgagggcaggggggtgggagtggttgtgtgggtggaggaacaccttcatagaagcagggggagggaggatgtgatagggtgtatctgggagggagggaagctgggaaaggggttagcatctgaaatataaataaagaagatatccaatataaaaaagaatgctgagaaagggggaccaatgaaaaataggagcatacttatatatttatttgtaagtatgaatctttgcgtttcacactctttctgtgtgtgtgtgtgtgtgtgtgtgtgtgtgtgtgtgtgtgtgtgtgtacagatcagaactcaaatcatatgcctttctcaatctgagtcccaccttatttttagagacacagtctttcactgagcctggagctcccactgattcggcaaactcccagaatcccaggcatgcagtattatacccagcttttagcatcatcgctggggaatctgaactcgggttccgtgcttcagggactgtactaatgaatgtgtcaaagaaggagtctctaaagcactctgcacctggggtaggcttgttggttgtagcatccctgccatgtggttttggcctcctgggatggggaaggatgcttagtgctccagtgaggctcagcggaggagggagagacaacccattacattacagtgtggttttggaaagcagaactcgttgctgaggagggtctgtctctgtgctgctccagacgttgctcctcgtcgtaagtgtgatcgctgtggccgcggccgtgatcccttggatcctcataccattggttccgctctcagtcgtcttcctggttcttcggagatacttcttagagacgtcacgggatgtcaagcgcctggaatccacaagtgagtacccgggggtcttggatggatacggtaatgggcttggtaacgcagagagcatccgtaatcgaggggaactgtagttaagatctgtgaaattctacaggctgactacaccccagcagtcctcgcctggttagcgttcatttggcagttgagcatggttgttacacccatcagggatcatttgagtgggtgacttcccaggtgtgactttgcagcttaacctgagaaatgagtagatgccctgtggacagtaatactcccccaaggacagggagccctctctgttgttcatggcttacctcccgtggacacaggaggcacacaagaaacgttttctgataaacatttctctgtaggctagaactaatttagaagggaagtaggggagtcagagaataaaggtgaggtacttctgggcgagcctccttttgtgcatcccggtggtgtctttagttcacaagtcttggtgcaaaggaagctgtgagcattcagagaaaggctggtcgtcccacaagcaacactgtgtcatagactgtgtcagtgtcaccaggccttgagccttttccttccaaatatgtataccttggtatagctttgacctagaaatgctcataattttgtctgggcccctgctggattcttgggtgtgagtcaggggctgtgctatggttttgctgttgcttcggtagccactgccagcgccactcacttggcaagaggcttaaacctgacctgtcctatcctgtgctccaatagatttttagagctctggagtctattttcagattgcacttcatagctgcatctggaaacatagttggctttagtgggagtttatcacaatgtcttttgttttgttttgttttgtttggggggggggtgtttttgcttgtttatttgtaaaagtaaacattgcaaaggccagtggtacatagttgcataaaaccacaacagtacttggatgcgtgacacaagctgaccctgtcatttagtaatgcctagattatgaaggtatgttgtcattcctgtcaggatgctgtgatccattagccatgtctgccacgggcatcagctatcagagtattaacctgtgccacatattttaagaacatatatcccgcagtgtgctcttccaaagcgtgccatgtcaggttctctagtgtgttgcccaccttgagcggcttagtgagaactccagtattggggataccgaccaggtattagcagagagagaactgtgggttctctttgtgacaaagtctagagaaaaacacccagcatacttaacgcagattactctccttttgagatactggctcagatgagaagagtgttggaaagaagacagctgtatagtgtggtccgagtaccccgatatgttcttccctttgtgagggcttttaatgtctgccctgcagggttctcatcgcttgaggtaatgcttggaagtccttgctggctactaccaatggcaacagaagaaaatcaaaccagttaatgacaagtgtcccgtggtatcctgaagttatcctggcagggcaggaacgcggcctgcaggctctctctaggcttcttctctgaggagaaacataatcccttagcttgtgtcccagaggggcttcagagtcctggaaaagccacaatattaagcaatgcaggatgacaccttcctgaaattgctgacaaatgacatctgtgtcatagagtctacttcaagatatccttctagtaatgtgggggaaaggccagatggcccccagaatgtagcatgcttgttaggtgaactagttaattattttcgtagtccttagcttacccaaatggcatgtgatccgtatgcagataaacagggcacagaagaaactggatcattttttaaaggtacaggtaccttcaaagccacccccaaatttcttggaattcttcatacacaccagtcctggttggcaggtgtttattcagggaacatttcctttctgaaaagaatatcaaaaggagaggtttctttggggtatcgtccacagtcaggtgcctggtcaggagacagcctcagggtgaatgatgcaggcatccacacactcatgaggaggctggccatcatcgccacctccagtggagatgccttgcctctgggaatgtagtccttcctcagtcatccctcagtgaactctgacctacaagatggttctttatcttgctgcatctgtaccctcacacaccccaccccaccaatccatccagctgcagtgtgcactgtaagcatggccatgtgagacaagggctggggctgtgcctcagttgatagcacccactaagctgcaggttcaatactcaacaccacattaaactatcatggtgctgcacatacctgtcgtcccaatcctctggaggtagaggcaagagggccagttcaaggttaccctcgactgtgtagtatgcttgctgccagcctgggctacatgagactccctttcagggggaaagaaaatgactggttggtttgctgggtcacgacttctgatctactcttgctagtacagtcttatccacagtgcagacggagcctgacagggagttacccttgcctggcagtgggcagcccacctgtcaccccaggtaggctgggacctggcagtcaggctgcagtcttctggagacacagtttcaggccatatattttcccccgtactcagagatagataaagaggaatttgtcctttaaattctgataagatgaagccactgagactctagcgagaatctggaaatttcaggacagtgagcatgtctcactagcctcagaccatgaggatgcgtttccagatgggtattcatgaagacgaggcttcaggaagctgaagtcaaggccaggccaatgatgtcccctctgggccagcggtatgggcgcaagtgcagtgacacccaggcacatggtagccgtaaaggactgtccttgcgctactaggaaggcttccctggggtgcagaggagatccctgtccgtttagctcgctttttggccagctggctgtatcaggtactctcaattactaggaagcaatagccacatgctagcgcttaaactagcaatctacggtggggagcgaagcatacatggatcacgctaatgtgctatgataaatgctctaatgaagttactttttagaacattaatagccaaaaaaaattaaattaactaaataactagtgaaagctcatttctttccaaagaaatagctatgaagtagagagagggcaaggatgggttagtgaaaggaacgatgactccgtttgactttggtggactgaactgaaacactcctttccgtcttgaaaaacgtggcatctttgactagggtttgcgggtgggtggacagggtcttctctgggtcgccaccagtgttttgttcaggagctcagagtcctttaggaagcccccagagtactgcatggtatgaagggtctacactgtggaccatggagtccacgagtccagcctcactgtggagcatgggaggcggggaatccgtgtgtccagcctccttgccatccagcctcattgagctttctgttctctttccatgttcacgcagcacggagcccggtattctcccatttatcgtcctccctccagggactctggaccatccgggcttacaaagctgaggagaggtgtcaggagctgtttgatgcacaccaggacttgcattcaggtctgtaggtttatggtagtactttcaaaagctggcagctgctgtacgcttaggtttgagccctgtggccaatcagttttgtcggccagcacctctgcctgtacttggactcctgtctcctgcctctgctcttaggatctgaaccctctcagactccctcatgtctggctttcctgattggcttgctcaacccttccacccctgtgccctgtggctctctctctggttacggctggggtctggggttggcagacgtatttttgcaaaaggcccggcctttttgtgttttgatgactcagaggcacttttaaaactacatgtggctcgttttaacacgctagttatttagatactgcccctaagctatgttccatccccaccccagggtgtgcagagcttgcaagtaaggaacaagtattggagctgtgtcctttgttgtagaaggactagaaacagtccacctataaggtgatgaaggccatttctctgtgttcgttgttatcattatatattataatatataccttactcatgcctttcaattctttttctcttctctcctttctttttttgaggcctctgtactgtttggggtagggtatgtgtcgaacattgctccgcatttcctgacttcctagaagttttgagtatgcaaccttgctgccctgttctgtcagcatctcaggacccccggccttcactgtacccagtgtggcttcttcaccgcagttagcggcttccgtgctcactcaacattgcctgttctgctttgcaatccagaggcttggttcttgttcctgacgacatcgagatggttcgctgtgcgtctggacgccatctgcgccatctttgtcatcgtcgttgccttcgggtcccttgttctggcgaagagtaagtgcagatgtgaataactatttatggtatgattacaatttatagccgtgtttgcagttattaaattaaactcttgccaccttgtctaatggcacattcggtgtggttctaataaagtgtgttaaagctcttactacacgtcagggtggataaggtcacgcagttcggcccagtgagatggtctgcttaggttctttttatttttgttagagtgagttgagatctatacagatgacatttttgaaaatccctggtctggtagccaggagatgagagccaagtttgccgtcagcactttgggctcagccctgggctctgtacttgagcctgagaacttcctggtttgttgatgagccagtgcacacagttaaaagagatgagcagctggacagaacacggtgctcactgccaggcgggcaccagaggaggaggtgtcagcgcgtgtggcgtgaattggccaagccggacctctctgcagcgacacctgaaccgcaacatttaacggtagaacaatgggagtcgagttttactgtcaaaagtgtcggttcttagaaaaacaccatcttgtttgcagtagtttccagctgtggctgcaggggacatagacagtgggattatgtaacaggctttaaaccatagtgacaaatctgaataatggcattgtacctcacacaaacaatgccctttcttcagtgtatgccagtccatctgagattaataaactcatctaatagtcctccagaattcttaatgggtttttaaaattgcatcataatctcagtcaataagtagaagtatgaaaactccggctgtataccacttgttgggtcctcctgtaaggtagcagaaagcagcaggctcctgggaggatggagactgattgactgtcctttctccttcctcctcccaaagctttgaatgctgggcaggttggcctggccttgtcctacgccctcacactcatggggatgttccagtggtctgtgcgacagagcgccgaagtagagaatatggtaatgtttatctgaaagttctcagcctttttaaaatcctctttgccattaaacgacataaaagcaattcttatgtaaaatattaaaactgttattttttgcatcgcggctaacagaggtttttggtttttttttttttttaagatcccgctcccatctgtttaatgttaatgtaaaataaaatgtatacatctttttctctgtctcatgtatgctatgtcagcaggttttagattcatcacaagctgtcttcagatgtaataaatgcctctgtaggagggaagttctgaaatcctagagaggatataagctaatttctcagaggcctgtttatttttgtttcttaatgggtaattcctcgttcttggtaagagaggaattcagtattttgaggttgttggtttaattaatagctctccccactcccccacttctacccgctcgtcaccagtttttagcctcatctcccatgctaggagtagaaggcagggggcccggggtcactgctgttcctccctggtaaggcaagcttccatcccgaaggtgtttctcggaggtagctggctgtagcaatggcagaaggtttagtcaacatgcggactgttccctcttcaaaatatttactcctgctaatgacagaaacagtcactgtgagatactgccattcgtcccctctcacacgatagtgagtatccttctgtagcaagagattattgatgagagggcataaactcttgattttacaacccccccttttttaattggatagtttttttacatttcaaatattatcccctttcctggtttcccctccaaaaactccctatcccaccccctcatccccttcttctatgagggtgctcccttacccacccatacccacttccgtgtcctggcattcccctacactggagcatcgagcctttctaggaccacattgatgcccagtaaggccatcctatgctacatatgtggctggagccatgggtccctccatgtgtactcttgggttggtgctttagtccctggaagctctgggggagcgggggggggggggagggagtctggttggttgatgttgacaaaaccctttcattgtgtttgtggaaggtgttcgtgtgtacgtctgttatgtatgcatgttgcgtgtatatgtgtatgcacagagggtagagatttgtacaagtgacttcttcaatcacctttatattttgagacttagatgctgcgaaaacccaaaggtcttcacgcctgcgtggggatccgcttatgcactgggtcttcacgcctgcatggggatccgtttatgcactgggccatctctcccacccctccccttgctcttttcactcagtgttataaggttgaagcgactgtctataaacagagctggtgttgatgagcaagactgtaaatcatcacagtcttcaatagtctcagttagcatcaagacccaagtgacccttacccagcctcgtgtgggtgaaatgcacccgagatcaagcccctagctggcccctgaccgtgtgaacgcctttcctcctttagatgatttcagtggagagagtgattgagtacacggacctagagaaggaggcgccttgggagtgcaagaagcgcccacccccaggctggccccacgagggagtcatcgtcttcgacaatgtgaacttcacctacagcttagatgggcctctggttctgaagcacctgactgcgctcatcaagtccagggaaaaggttggtctgacccatcttgctcctctagactttcagctaaagataccgggccagatgtccatgtggatatccggctgagcccgtcagcaagactccctgttcccccgtggatgccagtcagtccagccacctctagaggcagcagaagtaacatcaggacacaaacagcatcagggcaacccgccacatcctcccccttgaacacgaaagataagtttgtgatcctgcttagtgtctgccttcattccccatggtcggtagggccggggtcaccgagcttactcagctaacaccagggaaaccgtaagtgctggagttagaagttccttttgtcctacagacttgaagagtctgtccctgtccctcccttcaggaccagcgttatgctttacatagcagctgtctcttccagtgctttcctgtttcagagcctcaccatggctggctgtggccatgagtctgtaactctctcactaagttcttctgaggatgattcatagcccttttcattcagataaactatctctgcctctctggaaggctcctctctctcacaagcagaatcattcacgatgaccgaaaggtgagagcagcctcagtgtccacggaaaggctcggcagagtgcggtgggtgcttccgcagatggtatgcagcctttaaaaggaaacagcgaaaccccagcacattctacaacacggatgtaccccggggataacatacccggccagagaagccacagaagcgcaatcctgcatgaacccactgtaccgcctggaattgtcccactcatagagacatgaaggatggtgttttccagagccggggacggaggggcgcagggagtgatgggtcagatgatggatgcaggaggtctacttttgcaggctagaaagccctggatatgtatggataacaatggaggttgcgcactagtgtacaactaatgagtactgctgtccactgtgcttaaaatagttatggtgaggaattttatgttaatttcccacaatttagaaactgcataaaatacttgagagtgatagtttatatagttgtcaccccatgggatttatagtcacctgagagacagacttctagttatgtctgtgtgtggtgggaggtggggagagggtatcttacttagttaattccagcagggaggctggtccactgtgggcggcaccattccctgagctggagtcctggactgcatactaaggagaaatcaagcttgcataagcgtttaccactctgttcccgtgaccgtgaaggcagggtgaccagccccctcatgtttctgctgctatgagtgcgtcatcatcatggactagagccttggctgccaagacaaactctgtctctctgcttctgtcagggtattttgacacggtagcgggcaaactaattaagacaaatacatctgtgtattttgcagaaggtgtttgtttgtttgttttagggttagagcatgaattgaagttctggatatagctcactgtgccctggggcttcctttggaagttaggggacattctgatccctgtcattctgcagggcacatggtagatactgaagagagatggctatgaatatgagcaaatgagaagcaatatacaggcaggaagaagcctgtagcaaaaaaaaaaaaaacaaaaaaaaaaaaacaaaaaaaaaaactttatattttaatttaattttatatttttacttaatgaatttacgtcctgttcactgttcccctctcagtcacaccccacacacaattcttctcccctccccctccctttcttctctgagtgggtaggggcccctctgggtctctctctctctctctctctctctccctctctctctctctctctccctctcactcactcactcactcactcactcactcactcacttcaagtctctgcaaggctacgtactttctcttccaccgagaccagacaagacagacaggctagaagaacatatcccatatataggcaacagcttttgggatagcctccattccagttgttcaggacccacatgaagaacaagctacacatctgctacatatgtgcagtgaggcctaggtccagcccatgtatgttctttgtatggtggttcagtctctgagagccccaagggtccaggttagttgactctgttggtctccctatggagttcctagcccctttgaggctcacagtcctttctcctattcttccataagagtccccaagctccatccactgttgggctgtggttgtctgcatctgtctgagtcagctgctgggtggaggctctcaaaggacaacatgctcctgtctgcacgcataacagagtatcattaatagtgtcagggattggtgctcgcccacaggatgggtctcaagttgagtcggttattggttggccattccctcagtctctggtccatcccccatgcctgcatttcttatagtcaggatacattttgggttgaaagttttgtgggagggttggtgtctctattgctccactggagttcctgcttggctacaggaggtggcctcttcaggctcaatatccacagtgttgtgagtcacagctaaggtcacctccattgattcttgggtatttcctttatcccaggtctcctcatactggagatgccctccctccctcctcacccctgtcagttgcagatttccattcattttcatggccatctagccatctctcctgtccttacccacacctgatcctgaacccccaccaccaccattctccttcccacaccccctccctcccagatccctccctccatctgtctcttacgactgttttatccccctttctaagtgtgattcaaacatcctcccttggtccctctttcttgtttagcttctttggttctgtggagtatagtgctggtatcctgtattttatggctaatatccacttataagtgagtacacactatgcatgtcctctggggactggattacctcactcaggatgatattctcaagttccagtaatttgcctgcaaaattcatgatgcctttgtttttaatagctggatagtattccagtgtcccagttttctttatcccttcttcagttgaggggcacctgggttgtttctagtttctggctattgctaatgaagctggtatggacatagctgagcaagtgtccctgtgggatggtggagcatcttttaggtatattcctagaagtggcattgctgggtcttgaggtagagctattcccagttttccgagaaactgcccaattgatttccaaaaatggctgcacaaattcgcactcccaccagcaatggaggagggctcccttcctctacatcctcaccagcatgaggggctattgagtttttgctcttagctgttatgatgggtataagacgaaacctcagagttgaacaaaacacttctgcagacaactctgtcaacaacccgtttcctaaacaggcatggggaaacccactcctccccgtgccctttgtctctctctttttttttagcttctgtgcactgagcgcaggcactcaaatgtgaatggcaaacgttctgccaccacgatatacctgggccctggagtgtgaaatacttcaccagctgcttctttaaactctccctaccaccaaaccatttaatggactaatcacagctgtgatttaacgagtgatacccttgcgacatgaaagaataaacttacaacgtggtgcccaaagggtatgcaaggtgcagccttagcaagtcacttggcaaaagcccgaccctaattatttccacggcttccttgtaggtccgcagacagggtggaggactgtgtgggtaaagtgtgaggtacagctctgatgaaagccgagcctctcggttgtgtcctgacagctctgtaggatgcttgcttgcttgcagacaacacgcttatcagatctgacgtcgagggcgcagttctcttaatttgcacgtgtcttccatttccttggaagccacagaagacgaattatgtgaggaactctgttgaacaagttagaaaacaatgtgtagccccagacttgtatccttgcatcttaaaaataccccaaaccgtaggattacctgaggtgctaaaaggctggacaggaaattgaatttgaaggatgaattatatctgtaataacttcattttttgacctgtgtcttcctccccttcctcccccaatgtctactgcagtagtttatactcatttagaggcagctgcaccacgggatgttctctttctcctgtaactgtggggtttagccttctccttatatctcttcccaccccccatccccccacacacacacttgctgactgtcgcttcgtgttggatttaggggaacagatttgttctcttcgaatggcttcctccaagatccctggaagttatgggaaaaactgaaactgtaatcatgacgagccaggttcctaatttctggaaagaacaaaaatgagctcagtagcaccccaggtctccagttagcttccagacactggctgcccttttcatttgggtgattttgtggttgatttgaccattggagagagtactgggccgttcaaaagcattttccagttctagaagtagattgatttgggtgtgtcatctttttattttttttttcttgctcaaagctattactttgataatacatttttacacatgtgtgccaggccttgctataatgggcaagaaatattagtttcctaccttttctcccttttttacataatgttttctgagagaggcttctctgtctgtcacgtgtgggacttccacctccccagcccgtccctcagtcctggctgagcccgaagcatcacgtccaagaatgtggtaggaatacagacactctaaacgcgccagtgggccctcagctaagcatcctatctcacgggaattgttcttgatttctatgggtacctcaccctctcctgggaatggcagagggtggggggttggttggttggttaaggttttctctctgtagccctggctgtcctggaacttgttctgtagaccaggctggccttgaactcagagcttcacctgcctctgcctcccaagtgtttttatcaaagctgtgtgccatgactgcccagcacccccccctttttttatactttaacattctatccatcatgtggtaatataattcttcctgatcacatggtgatgcgtgggttagcatctttctagtggtcacagactggtgtcacctgcaatccggccattccctgggagcagcctctgttgcataccagccctaccagccctaccagccctaccagccctaccagccctaccagccctaccagccctaccagccctaccagccctaccagcccatgaactgccagatttccgttcttttcatcacttcgagacatacaaaagtaatcttttgtgagatggctcagctggaatggcgtttgtcccatgtgatggcccctgttcacctccatcctgactctgaactctggtggttgaaggatagaacactgtcttgcaagctgtgctctgaacccacacgtgttgtgatagaagttgacatactcccccacccccaacactcacaattttttaaaagtagtttcactgccctcaactggacatcagttctattctactttccggatgatcaatcaacctcagacttctctcgcctgagcctgagccatggtgtcagtttgtcctatgaataactgctttctgattagcaagtaccccaatgttgtccatccctgacactagggagcccccacgcaatggataacacagagattgaccggagctttagtccctctcagacagatacaggctcaggtatgcccgacctgggcacaggtccttaagaatctgcacttttctgctttgctctatcaagagtgatagggcctcacatctgcagtgccccagcacagagaccaacacagtaaagcgtacgaccacatttggctgccattatccaggagttaggttgcttagccacttaagctgcataatatatctgccccaagaaaagaagcagttacccacttactgttctagtctccagtacaggatttacctgttaggtctatgctctctgtcttgcgtgttgtatacatgaacattttagggatgatttcataaaccgctcaagctggagatgaactcttaactcctagggaattgctgtttttcctgtaacatggcagaaaaatgcagctacctacaggagaatccagtgtagtcctgaacaaatggtcctggggccgcttggactctgtaggtcatagagttggtatatgtttaaagagacagttttgggggcattggttaggagtggagatggccgcatgagggacagatggagggtttggtggggttagacatttgtaaaatgcataaggtcggaagatagaagtgagtgtgacaggtatttggatgggaggaatcacactcacttccacctgctaggcaagtgtgtaacacacactttcgtgtgcaggaaccctgcagaagtgtctgtggtgctaaaggtggacacattaaggatatagaggtttcctgggtgaaatcccagaaacagagctggaactgagttgtgagtgcctggggaggccagtaggaaagacaggaggaagatgccaccagtggtcacctgctcctagtgagaaacaaatggaggacaggatcctcctgtggggaatcaaattaatgctggttagaaaaaaatagaagttgtaacttctccctggggagtgtgcaaggcagtgattgccgtgaagatcaagaaacggcttccagaggttggcttggcaggaactcacttcttttgaagtccttgtacctgttgctgctcagaaagtaggtccacacctaaggatttattttagggaaataattaaggttgtttggaaagatgtagcttcaaggacatttaacatgatgctgtttatagcatcagaatattttgtaagcagctgaaacattcgcagtaagagatttattaaataaataattgtgtacactatattacatgtgccttaaatatttatacgaacccataaatgaccacagcattcatatgaactttattttgtttaactctatgagcctaagtcttaggcacacatagctaagacatgtatacatgtgtacacgcgtgcacgcccgtgggaagcactgttctgtccggagtgtggaaacgagcgttgatattcatttactttccggatggattgcacaggttttaattaggatgagtttattctattttattttaatgtggccttgtgttcagccggcagctgaggaaattagaaacaaaggtatcaacttagaaagcaaaagctctttggagcttgttgttgggctgcctgggaggaagctggaagcagggtggcctgagaaactgtggggaagtccatagcagtagccattttgagtggaacattgaatattagtcctactgagtgagtgacattggatattggtcctactgagcgtggagtatggagaattgatcctgttggggctggaaaagaagtctcagctgttaagagcacatactgctcttctgaagaccccagttcagctcctagcatgcacaacaggcaactcacagctgctcgtaactccagcttccagggctccgcctcctcaggtacccatgctcacatgcacatggccacactcatgaacacatgcacatagtctttttttaaaagtctaacatgttgccaccgtgattgttggagatgagccttggctaaattggggaaacagaggctattgaaagagctaagactggatcatctccatgcgtcactttgtggcgtggccctgaacttggtgatcgtcttcttctttggcatctgtgaaaaatccaccagttactggagaaatgccctttagatgacaattaatggctttcataggcacaagtcatcaatttttgtttagtttattttgttttaaattatgaggataagttagcagttaacggttctatagactggctgctctcagccttctgtttttatgggcacatccagatggtccctcacagactatagccatttgagtcttcaccaacgcattggttttctacatgtcacaaacatgggtttacctctgccttcgcgtgtggcagtttgtacaagtgaatatccagagatgggagcaacataagtgtgtatgcagagacacacctatgtacagaatcagcacttctgcgaggtataggttattgttgctcgtaagatagataacatccacagagattttaagactaaagccagctgcttacaatcactctttttggaaggccattgctgatggtgttagaaaacatccaagcgatgtaacagaaaatgcccagcatatagttgggtttggctcctgtttagaatggtggggttttctttttccatctcctaaatttacttaccagtgatagaaagcatgtctgtgccctccactgactcaagtttttttttttttctttttttttgagacatggtttctctgtgtacccctggcagtcctggaactcacgctgtagaccaggctggcctcaaactcagaaatccgcctgcctctgcctcccaagtgctgggattaaaggcgtgcgccaccactgcccggcgactcgagttttaataaggatgatgctctcacctgttgagcaagctcactggagaaaaggctcatttctgctcataggtttcagcatccactctcaaagccagttttcacaattcagtttcttccctgaccaacatccacctgcattatattgattctttgatcttattgtcagtacgcttcatttctctctgctctggctttaataagaggaatgattcttcacacaaacctttcccaaggggcaattgtacgtattaattggtttgtaaaatgccttttgaactgctcagatgaaaggccccatgtaaatagcaaaagctatttatggtggtactgttgttggtctcattatgtatgtttgggctactggaggactgccttttaaggtgtggagacccgagtttgcaaacgtgaaggtattttctctagagccacaatatatactttctctatcaacgatgaattcatggtaaatgataggacactggaagaaacgacgattcgggagtgtgcgattaacaactctggaattatccaagcagttcttaaggttccacaaacccagaccttggaagtggggctcatgagaagccatcttctcataagctactaaagaaactataggcttgtccctgccataaatgtgactcttgtgtacccaagggggtcttacccagggacaccttgcccccccagagaacatttgccaagacttgacattttaggttgccacagtttggagggccctatgggtttctggaaaggacggcccagggatgctagtagacactccacgaggccacttcagcatccactgtgaggaactgccctgcctcacaggtcagcagacctgaggctgggaacttataaaaagcagcttcgtagctcgcccttgaaaatgagcatgctcacctaggtgagctgcagatggctcatttttaacccctgcccccggatttcttcgcaggttggaattgtgggcagaaccggagctgggaaaagctccctcatctcggccctcttcaggctgtcagaacccgaggggaaaatctggatcgataagatcttgacaaccgaaattgggcttcacgacttaaggaagaaaatgtcaatcataccacaggtatgcaagttagagcgtccacacacgcttcttttacgggagtattgaagtttaattgcttttaattttattgctgggttttttttttaattggaggaaagggttgagccattaaccaatagccaatagggcatacttcagatattttcaacatgtattttcgtagataacttgagtgcatgcgtgtgctgcgtgtgtgcatacgaaacagagagacagacagacagacagacagacaggggaagatcccataataatatacttaggttcaatctagattcagcgtccctggtattacacttttgtcctctgataatgacataatatgtagtgagtaagagccttgtgtaaggatgcgtgattgtaagtgtaatgaggcagtgagacaataataattaataatagtcatcatcatctccaggctgtgagagttaagaagcaatagacgctttgtagacactctccaaatcaggacatttgggaagtggcttaaaccggggagagggagccgagggaaggttcacatctctgtttacttccaggcaggcagtggcatcaccgccgctgagaaccgcagtggctgagtgcttcacgccggcctggattgtggctggcagggcgctggtggtttatgctgccatttcttcctccttgccaccccatagccgaagatgtccaggcagtgtcaagagagtggatcactcatgtagcttttggtttagtgtcttgccacgttgcttttagttctacccagaataattcagaaagtctttattgagtaatgagcgtcttctagttaggcagccacaggcagcatagggcctgaccccacaggcctgcagcctgcagctcgggagcctggcagcttcgtcccgccctcggcattgacgctctcgatcacatggattcggctccaggcttgctttggggaggggtttattttggtatgttttcacactctgtaatcacgtggccatcaaggggagttggggaacctgcacacatgcacacatgtgagaaatgcagaggagagacatgggagaaaaggcgaagcagctgtgctttctgagcaggtgcccgctggggggttgcttgtgtattataaagtacagagaacctaacactcggagagaaggggactgtgggctctgagcctgtggcctcccaccctgacatgtagggtacttgtcatggtagagcaccaccgcactgtgatgaggtggtggagaaattaaacctctgaggtttactagtgggaagctaaaatggtacagccaccgttttacacacaagcatggggactcctcatgagactgataataggactgcaacatttccagcaattccacttgtgagtgtaggagtgtgtgcgtgcgtgtgtgtgtgtctgtgtgtgtgtgtgtgtgtgtgtgtaaactcatgcacacatgcacatatgaaccaaaagcagggaacagcagagatatttgctcattccagttcatagcagtggtattcacagtagccaggaggtggaagccacccaagtgtccatcagcagatgaatagcgaaagacaaatgtggtttatacaaacagtgggaagttactcagcaataagaagggaggaagttctgatgcgtgctacaacaggagcaagctccaaaagcatcatgcagcctgaaaccggccggtcacagaatgacagagagtgaacagttctgatcacaggaagagtgtttaaattcaaggagccgcagtcgatggggaccactggggaccccaggacaggaaatggctttgttgaatgggaatggggattaaagttttaagaacagtcagcctgtgattggtgatgaccactacaaaggatcataaaaacacttagcaccactgctatgagatttaaaatgacggagaggggagggaccaggagacgctcagtgagtaaaggcacacactgccaagcccagtgccctgagtttgatcctcattgccacgtggtggaaggaggaaactgatcagaaagttgttctcttagctctgcaagcaaaccctggcacacatgtatgcacaccctcaggtaagtaaatgtaatagttaataataataataataaatgattaaggcatagatttcttgttgtacttgtattctgacaagttttttaaacattcaaaagacccttttaagaaaaatagaggaagcaatcttccatcacgtaactttcccctgagcatgagaagcatggttatcatagaaatcagagctcaaatcccaggggctttgaatctcagaaatgggcctgagaagaggccagtgtgtctgtaaagtagctcacagccttggatggtaggatctagaaatgtgccccacgctacttttaatattccttagtaagaaatggttgtgtgcttgtataaataaaagaactctaaataaagaagctgcattcagacgattcttggctctgctgggaatggtttagaagcacatctgagcaaatgctaacacaccttgacatcaccaggtcttggtgctgttccatgagatcctcctttactgcaaaggctacgtggatctgctcccaagaatgcgttcagaaaacagtgcttagatttgtgtctttgtagaacacgatcactatgcgctgcaagcacagccggtctcctggatgctagttggttgacataagaaacaatttggagaaactatgcatgtgtatagaccccaggatagactgcagtgtggaaagaccccaggatggtctgtgcagtgtggaaagaccctaggatagaccgtgcagtacatgcgcttactgtcaacctgccccgtatttttatccatctccgactgctgggagggaggccttgatggagtcacctcactccccaggctgagtttctgtaattaccacctctcagattcttcatgaaggatcagctgcgtgatagaatgggaatggcctgatgtgtgcttcttaaggataaatagtaactattcataaatagtaactattattaaggcttatggtacagtcctatatgtgtataacccattctagaaagacttaggccattaacttctctttaaactcttataatccctggtgattttctttaaatcaaattatttacataaactaaacttagtgaaagaggaagcaaaaacaaaacaaacaaatcctcccaaactcagagcattactcagaggcacaccaaaacccgcatgcacgtgcggcacacagcggggagaggatagctatggtaaaacctgacaagcctaatgtttttctcacagaagcaacacttctcctaacagctggtctgcagccctaggtgctgttgcagtctcagtggagttcttttgtctttgtgctcttccctgcccccatttcttaaggttttcctccatctgactgctttaaaggcttgttgcagctgtgacagcctccatgtttcccttcttcccaggcccttaacccatccccaaaccctcatttgctgaagagtcaggcccagcagctgcatagccaggagtccccatgccacctcctggatcatgctggtttgaaactgacctgtggccaaccatatgaactccatactaaaatctgaatgccttgtgggtcatctgcccacctccacacacccacatgctcagaaacaaacatctcacaagcactatcactccagtctgtgctgtggtattttctcagccctgtttatataaaagagaaaatgacagtcaggagcctcaaaattgatttcatgagccactggtcacacgcctgccctttgaaaatgctgtgcccgctgccctgccttggggactggtgcctgctgactgctaacaccctggaaaaggggagcctttgatagagcagccaggaaggaaaccaaagatggaggagatctataactcattactaactatcacgatagtaacatcagaacttagtattaaccagtctccacattctttttctcgtgaatgtttataatcaaacgacgtaatgtcagttattttagtcattgtctctctatccaccctgcctaggaagggttcctaaaactatagccagagaaaacgaataaactcagacgaaagtcaaaagtcgcggaaagccggtaggcatcttttcctaaggctcttggctcggtcaggcgctttggaaggcagttttgtgaaagtggccttgcccaaaaaatacaagtgacaaatagaaaatcattgtagaaacgtggattcactgggtgccatactgaaggagcgccaagatactcaaccgtggaggcagagcccatccttgtatgtgtagagaattccaatctacagagcgacgggggtcaagcatcctgctgccctaagtgagcaggagccaaagctgattgtgtagcacgggaagcaaaagagaaatctaggtccgccaccgagttgcaggtctagatgaaccaagccagcagcccgtttggggagcagtaacttcttgctctcttctaagctcctccccttggttgatggctaagctcctccccttgatagatggctaagctcctccccttggttgatggctaagctcctccccttgatagatggctaagctcctccccttgatagatggctaagctcctccccttggttgatggctaagctcctccccttgatagatggctaagctcctcttggtagtagacagctaagggcctgtcatttgtcaacctctcaggggcaattcagaaatagagtttaaggaacagagggttcctaagattggtgacagttctgggcgggactcctgagctcctttaagtaacaagtgaacggagacggagccccacttgagctgtatcttcctagagcagaacaaatggctgacacctgtacttcctccgtaccccctaccaccttcgccaccgccaggaagagagcccaagatgagcctggcttcaggaacagcttatcagaaaacatctgcccatgtggatctcaacattttttttctgggtagaatccctttacaagcagagccttttttttttttttttttttttttttttttggcaccaaggaaatgttctcaatcaaagagcaattcacagcaaattcccatttacaacggctagcaggggctgatgtgtaccaacatctgtaatctttatcatgatcaaacagattctttgtgtatgtttaatagattccctttgtttgtaccaaaacaaaaagccaggtgctttttaaacagcccacttctttttaaaattcccctgagcttctaatgagtttaaaaggttaaccagaactgctatgcctctttaaggcccctttctgatcacctggtgtgtgtgtgtgtatgtgtgtgtgtgtgtgtgtgtgtgtgtgtttcaaagagaaaagagggtaggtgtggtgttactagtaaagaaatacaattggatcccagcctaatgcagtccctttgttcctgcacactgaagtcttcattaaaacccatggcactgttccctggagctggtgacctttttgtatttaaaggcgactttacaggacttaaattcttctctttttgtgggcgaacaatgttctcttcttctgaggttgcatgatggtgagttcattcagaggctacaggactaagggaagaagaaaagagaaactgagcctgggggacttcaggtgacgccacctttgagaccgggaaccgctgcccggcataaggatcagagtagacggggcttgggaggcagagcagagacagttcgggccccaatgcgtggatattttaggagagggatgtttcctggttggtgcccccagaagatgagagtaagcgttgaacattacgcttgttcatttgtactttttgtcttggtccctggttggcttaagtgtctgaagttgagcgggttaagtttctccttagcataatggaggcctagcttgtagtcagtgcattcaaaaagcctagtaaagtctctaatttggggaaccgggattatcagcttggtaccccagatggtttcatttagactggctgcttctgggtggcacgcctaataagagcgtgtgttatgttagtaccagccaagctcctgccactgaatgtgctgcaaaggcttacaacagtagctggatgatgaaaaacaagtttgacactaggcttctggttttattgctgtattgaataagtgcatttattttcctaatttgactcttattaaagcctatatcatcagaggaaatactgaggctaataaattaggttgtcggttcctcccattgatccctaccctgaagtcttctgcctgcaaacatttttttacaacacttatttataagactagtttgtgaaattcattgcttggaggtgggtactttaaataataatatctaccagaaataataattaacttcacccttatctcccctctcagtatgtatctgctatgaggacttttttatgaccttttgaagataatattagggattttatttggcaggtggataaactaaatgagcagtgtataatgcatttgtcctagtaaaagcagcattgtcaacaaattgcctgctacttttaaagaaaatatagctccaaccagttaatgttttattaaatcactctccttgttcaacaagtcttgatgaaactttacttatgaaatgtgtatccggcgtgttgtaacaaagaaaactgctcttgtttacttaattattttcttctaacattgctaaataaacatgagtgattgcccaatactccctttgagttgacagtatagatttaatagagacccttattttagtgaatagtggtctagggataattagccaaacttcccaagggtctcttgtttgaagctggtgtttaggatacaagagaaagcaggttctgtggctgatacatataatatgatacatataatatgaaggagtttctaatgggaggaggtagggataaggtaggcgtcagtacctgctcgtgagatggggcgttggaccagaactgtcattcctctaaggcaccaagccaccattcctactatgctaatactgtgaactttgtatgtctgcagtcacttacatgtattagtgttcaaggtggggcactgcagaagtctaggagttctctgtcagagtctagacctgatatattggatgtgattttgctgtggaacctggaggaagaaaagctgaggtagatatcagatctcctggacaaggaaagtgacctgtccttcacataaacgaagaaaccaactcttatttcccacgtgggctcaaagctgattcctgaccatggttacctcaaggctctcatatacacactcttagagccacttagtcggggcctctgcgtagcgtattggccgtggtgctgagtctgtgtggagaggtcagaaaagcatcaaagagagaacagttggcagacagcaacgtgccttctgtgaacctcatataagcaagaagagaatttacctgtcttgttagttgtgctcactcgtcctccctccgtgtgtgtgtgtgtgtgtgtgtgtgtgtgtgtgtgtgtgtgttttaaatctgaagtcagaagaataatgtttattctgctgataagaaagtcccaccacatgcagatggccatttgtctttcatcttacattctgtaattttaagcataaccttagataagcctttggtattccttcagtttgatttagttgccattttcaaatttcttatgacttcacaatcaactttgcacaaataaaattcaacaatggtgtcctagttcgggggctgtgagggaatttgaaggggaacagccctggtcttctgacacacatttttttttctgtcattagtgtaaaactaagaagcagtaacagtatcagtctttgaaggaaagtcctcctccttggtcttttaagtgttcaagaccctgttcaaggctaggtgacacatctgtagtccaggagcagtccccgggacctgtgggaaagccgtgacttttgttcttcacctctgtgtaccttgagattcttcacagccagttgggctcttctccgctgcccatgtcttatggcttgggttgtcagaactcctagaagaaaatccgtgcagcccccgtaagcgcacatacacgacgctgccttaaaacctagaaatcagcatgtgattcgggagcaactcctgaatggaagttgcgttagccgtccgagcttcacaatgggtttcggcttaccgcgcccttgtagttagcagtgaggttccccagacaggcagtcctgatgcacagacaagataatgtagggattggctggtgtgacgtcagaggtcatttccacgcttggaagggccactggctccgtcagccgcactcctccttgaatgaagaatagaatgcgacccagaagactcttcaccgaaggaggaaataacaggtttcacccaagcacaaactgttcacaccacgtcctgttttccagagtcctgtgagcacggacaagtagttttttcacgttactccaataaacatagctttgtttatgaccaggaaagtgtttttaacaacaggaacccaccttcctcatttcgttcttaagacggcacactgccacggtttcttctttgagcgttccgtgcactgggaaggtattttggagcacatttatgtgatgggaaatttaagagcagtgacattttatgagcgagcgtgttgaaccttagtggactcgagtgcctttgttttcctttctatgacgtcctgaaagtcagaacgtggcagtgacattgactctcttgggctcttaggaacctgttctgttcactggaaccatgaggaaaaacctggaccccttcaatgagcacacggacgaggagctgtggagggccttggaggaggtaacttccaccgttagcatctgtgtgtgcctctgttgagagcacttggggaagcaggggtcagtgctggaactatctttagttcccacttggaggagcattgatgtttgtgaatgggcgtgaagtgtgtataaaataatatgcatcatgctgcattttaacttccccaaatctgacttagccaatacattatcttgcttgtcctttgcaaacctcaaactctcctagagactcaatgtcctgtacaaatgttgtgagaattcttcccggggggtgggggagggcacatgaacaatgtctccccactcagcacatcccgaggtcccaagaacaaatcaaagttcagttcaccaatgatccctgtgggaaaacaatgggcttattaggttgtttgtttgtttgtttgtttgtttgtttttacagagtgtggatgagggggctatagagtgggtgaccctaaagcagccgttctggaacatctgcacctagcataggtgattcgttgagggagcaccttccataagccttccccaccccgtatactctagctccaccccgagtccccaaggccatgttcagtcagggcagaacttcgtacacatgaacaggaggagtgattggaaatgtgtgtgagggtccagtgaccttctaagggcgcatgccaccagtccatgagctgtcatgatgattgacaggtgcacagaggcccatgagctcaggaaggtgggctgtgtggctcagaaggtagtgctctacagcagccacttagcttcctgctttttctggggcagaggaagcgtctgcgaaaatgaggccatctgttttcattattaactgaagggaaaatgacgtcatgcttaaacaatgctcccgagtctcccctaagaaagtgtttataaaagcaaattacacagaatacgagagcactgtttgcggacaaacctgtcattgtaacgccgcagaagagtccagctggcagactcctggagccttggttagcttgctgtattgatacccttaattttggaggattttcctgttatttgtgtagtgtgtttctgcaggccgcttctcgggggttccttactcgcgcaggcaaaggattttggctgtgaaggtacttctagtttacgtgttttagcataagtggtttgcaagttcacgctagttctgcaaattaattgtaagctgcttaataataaaaatccctcctggagcctagctcagggttttactttttaaaaaatcagcggttaacggagacgcggtaactggctgatggactcttcgttgcagagactcgtggtatatttcttagagacaaacactaaaaatcaccagagctcagagatcagctgccctctgccattaccatagttacggttttgaagtagcgtcttctcccctgtcaccctttctggtaagctccgacatcttttaacttaaagatggcttctgactgtgtgcacacaccagttgggagcctaacggcaaaaggcatcttcaaacgtggctgccgtacactttttttcatctgtcacccacaaaatgaaatgttgctagcttcccttaactcacaaccgaggtggcggatgtgtaagacagtcctgagggtcccctgtgcttagactccacccaagccgccctaacagtcatgaggagaaccagtgacaggcccaggtccacgcatatcaaggtgtccgtgtgctgcatctggggctgatctcaggcgtcttggatgcctctcagcagtgaggcgccagtcacacagtcgttctgtttctctagaaatgctttgccttggtaatatttttaagaaacagggttggatagtttttaaaaattagaatcagtattatagtatgcttccagctggcccctcccctgtatgtgtgtctgtctgtctgtctatgtgtctgtctgtgtgtctgtgttagttttcctctgtgtacatgtttttggagaacgccaatacacttgagtgtacattgtcgtgaagaagccaaagctggatataaagattactttctcagtcactctccaccttatttttttgagacggtttgtcactgaattgggcttaccaattagtccacacggcctgaccagcaaggcccggggatctgcctctattttcccagagcttggatcgcaggtccacaccaccacatctctcccacgtcagtgtggggttcaggacgttgcgccacagcatacactttcctgaatgagctggtcttggttgtacatgtgttctcagtcacatgacctaagaaatcttgtctctaagattgcttatgtaggggttgtaaaacaccaagtgagtcttttggggctttagtgtttttttgtttttgtttttgtttttgtttttcccttctttgtctcttttttctctcccgaatatattatgtgtgtataatctcaaatatattatatgtttactttttttcttttctgaaaatttcagccttctctaatgcattccgattctttcatctcctggacagagagaggcaagactcttagaagatgacgagctgtgaggttttcctggcagtagttagagttgtgtggccacaagggtgtgaaatggcatcaccctgataggtcagagaggcccggcctgggatccttggagtctcaggctgttctgcagtgaggtcacaactcccacctggatggaggcttgatgctgtgtgtgcactagaggagacctggccatgccccaatgacacatgggctccctggatctctatctcatgtcctctgttatccccgtgactcccctctttacactgtatccgaagcagagcaggccctgccttccatgaatagtgggaaagctggtgacctcggctgttctttttaaagtaagctaaagcatgcatgactgaggggccatggccctaaacatagcatgtgtaagaaaaaggagggagaggaagagaccaggagggcaacccaaacctctgatccttttataaaggatgtcagtgcaaatggggaacccgagcccacgggttcacgtgagggcccgcagagagtgtcgctggttttatatcctggaagtgaaaggaagaagtgaggcatttcttacatccccctgtttcccaccccaattcctctcttggaaaggagagcgccagagagagagaaggtgggattgacattcagacaggaaacgtttccgtgaacattgtccattttgttgtttaactttctggctatactgaagttgtgtgctccaaacagtcagtgacaaagagcagaaatattgctactattgagtaccttgtggagcatcctggaaacagtggccgctgtgtaaaacggcagacgtagtaaataaagatggaacctgccaaatgatcacagcagttaaagcaaatcggccgcgtattgtttctgtcttaggtcagcctgaactagagcagacaatgaagaacagggatgtctgtgggtgtcagagtcatctagtgatgtcccagatggggcgatctactaggatatacggtgtgtctccttgtacagggggacaccatggggcaggaacctgaacaatagtgagatacccatcagggaccgtgtctctcagcacctcctctgcacgtagcccatctcccccaggctctgcatttcctgggcttggctcccctctccccctttactcatatcttcattctgtgaaggcatttccatctcttctctttccagacacaatggtctgtcttgatgtaaagtcagtaatctgtcaactactttatggttgctatggtggacaccctggtgaggagcatcttacagaagagggttccagaagggtagagcttatcagggtgagggaggagtgcaacagagagcaggagccagaacccgtgtgctcgctctctcatccacgcaaggaagcagatagaaagataactggaaatgggatgaggggcgaaacccccagagcccacctgcagtgaccacctccaccatggctacacctcccaaaggatccataatccccctaaacaccaataacaaccagggaccaagtgctcagatacaggagcctataagggacatttctcattcagacccccagagagtacaaacagcatcgagcatccctgtcaatcatgcctgggggtgcatagcagggagattgtgtgtgatcataacctcagggacttttataaatatttacaattttgttgtatttttcctattgttcccaacttaaaatataatccaaactgttccgtactgaaacaaatagtttagaatactatagctggatcaactttcccgaaattataattttaaatgctttccctattttaagtatcactgctgtaatatcctggggccaattaatttttataagtgatatgtatctcttacaatcatttaataatatgattgtattctatataaaagcatattcatatgaattcattttctaacttgtagaaacaggtgtggatgagacactcttatgtctccgtcataggtttgaacagttatttattgagagcttattgcagattcctaagctattagatagtcatcgagatagacgtggccctcccacttggaactgaaattcttgtggagaagttagggcaccgccaaatgcataccaaattaagactgataaatgcaataaagaaaagcaacatgaagagacctgggtgaggctatgactagtaacagacaatgtcgattgatctctttgtagcaagcaccgctctaaatacttacaagcactgactcattatgagcaaaggctcatgaagataggcatctgggctgtgataacattgtgtctcatttgcaggtgagaaagcaaagacagggagaagtcaggagcttgtctttgggagagccaggcaggacttaagcccaggcgttacaggttgatgcttttcatcttacagatctggggcagggagatctcagctcagttggcaacgggcttcctgcgaagcctgaggatccgagatcaagccccggagcccactcttcagtctgctgctctgttactgaagtgtcctgaccctttgttctgaatctcttgaagataaccccgagtttggcccgtgttcagtaaaatttttccaggagaaatattcataggccttaaccaccgcccagtgatttagtctgatatcttatgactcaagttcttcaaaggtagattactaaaagcagaccgtggatggggcaagaagatcttatgttgtgttcgccttcccatgggttgccatccactataggacacctatgaaattggagtaaatttatttcatagctttagtgatatcagactgaacttaagaggaacacactccatgactcctgaccttgaagaagtgggtcccagtcgttggagcttcttcagacttttgtgattaattaaaatcttccaaaatggtagggtacctacaggattatttcttcagggccccccccccttcctacaacaactcctatgcagaatgtctgttggcaaacttggccatacttacatttatgcacattatttgcataaattacatttctgtaaatgacattatataaatgtattttacattttctgtagtatatcgtgtatatatagggagagcttcgattctgagacttccacgatttgggggcagaggatcttggtggatgtcatgtagcaggaagggagttagattggtagagtgggtggctctgagatacaccagcttcactgaggtacaatttagatgtcaggaagtagtccctgtagaaatgtgggtcagtgattttgataaatttgtagcattatgggtcatcacagtgattaagatttttatctgtcatcttatagttaacttccatgactctcagtcactaatctgtcctgtgttttgtctctgtgaactcttaaagctatctcttaactaaccattaagaaggggcattttcaggacgttatgtagatggctcattagctaagggcacttgttgctattgcagaaatcccacattcttttccacaccaggccgctcatatcacctgtaactacagctccaggcatctgatgcccttctttatgctcctacgggttacatggatatacatagacatagacacatagacacacacacacagaagcacatatacacacacaggcacnnnnnnnnnnnnnnnnnnnngcacacacatacacataccaaacacaattttaaaagcaaaattaaatcttgtcaaaaagatgttccctgtcttgccccgttttacctagagggtaggtaaaatatgtcttccatgacatatttaacatacttaagccttgttactcatgacccaggaccaacagaccatgcttatcactgcttacctccatcctcacgaggcttccaggaagaagtactccagagcttatcatgaagatatttgtctaatagttcatttataaaagcgtcatccttctgtctacgtctacaggtacaacttaaagaggccattgaagatcttcctggaaaaatggatactgaattagcagaatctggatccaatttcagtgttggacagagacagttagtgtgccttgcaagggccattctaaagaataaccgaatactgatcattgatgaagcaactgcaaatgtggacccaaggtacagagccgaggctaacttggacgtggcccagagccgaggctgacacgaatgtgctgttgaatgggagttctgggtgtggcccacaggaagcatttgatggcactaggggatgtctgtgtgtatcagcccttcatatgtgtggtgcactagtgtctcgtgtgcagagttgtatgttttgtaaaatcatcccatggctgtgcatatctcgttgcaatcataccccagactccagcatctaaaaccttctagctccaagcattcagctgttcagaaatgggatgctgagcttgtatcctaggcctcccaagtgagttagagtcctaaattccaaatctatgtcaagcagtttggaggaagaagaatcatttgcgttgtttctagctagactgtttagattctagctttctaagaggggagggtgtataggagaggttgtgcatgcctgtaacccgagcatctcgaagcctaaagtagaaggctctggggttcaaagccacctgaatggcatagtgtgttcaaagccagcctgagctctctataataatagggatgataataaaggatttttacaaatgttgttgagggtcatgtgacccttccccatctttgctgactcgactgtgacctctgtgactccagaacggatgagttaatacaacagaagatccgggagaagtttgcccagtgcacagtgctcaccattgctcacagactgaacaccatcattgacagtgacaagataatggtgagttctgccctggcagcgcccacagatgctcacaccactgtccgtttatccttccttctaaaaaaaaaaaatgataggaacccccagtaagcaaagccccagctaattcttctgttgccagcagtgcctcaagtgcttatgtatgctttgagtcctactatgcatctgcctttggtgtgctcctctgtctactgtctgttcaaatgtatttgcaggaccatcttaagatgaattacgccccaatgaaatgtcccaaaccaggcagtgcgtcacactattgcttcatactctgttgtagtaggacagtgttattttgtgcatgccacctgtcttagtgtttctattcctgcacaaaacatcatgaccaagaagcaagttggggaggaaagggtttattcagcttacacttccatactgctgttcatcaccaaaggaagtcaggactggaactcaagcaggtcaggaagcaggagctgatgcagaggccatggagggatgttctttactggcttgcttcccctgccttgctcagcctgctctcttatagaacccaagactaccagcccagagatggcaccactcacaatgggccctcccacccttgatcactaattgagaaaatgccttacagctggatcccatggaggcatttcctcaagggaggctcctttctctgtgataacctagcttgtgtcaagttgacacacagaaccagccagtacaccacctttgtcacggcttccctgatcagaaactactgttcctgtggctggagaaatggctggttagtcatgagctcttgtgctgtttagtttttgtcacacactactcttgcagagaactctaacctcagttcccagcacccgagtgtgaaggaagaggaagaggaaggttagtgtggttatcttcgggtttttcctagtttgctctctgttgctctgggaaatgccaggaccaaacgcaccttagaataacggtttatttcatttcatcgtaatactttatggtccatcactgggagaaaccagggcagagactaaagcagaagctgttgaagaatgctcctcactggttcgttctccacggcttgctcagtctgctttcctatacagccctgaccacctgcatgacccgtaggtcctagggatatttcatggggctcagcggcccacaacagggaaggacagaatcttgcagaaatgccaaacaacattctctaactccggccagtcactatttaacccacacgtgggtatgtaggcacgaacatcttgagtttcccttcacctctgttattgtcagtggtgtcagtgtttgccttgctggtgtctcctggtaaatcttcagggcctgttttttccctcattatctacatctttatcctcagtgtggtttgacacgcaggttacaatctggcccttccctcccttcctggcctcaccccactgcactgtccctctctctgctacggaggatgaagccacggtggtgttccccttgtcctgaggtgtgtgtggaggctgctgtctttctgacagctgtgctttctccctcctgagtgttggcagctcagactgaggtctctagcagtgtagaaagagaaatgagtggatttgggtaaggtggcaaacagcgtgactggacttggattgaatgtgggaggagagaggagtccccgtgttggtttccaaggtgatcacgagagccctgggatacatgggtgagaccagggtgaagtcaactcaggaagggctctctttgaacatgtgaccttgcgtttctctgtgacattggccctccccctcagaactccagtgtggggaagtcttcggatcatgtcccctggccatggagatattagagacaaagcaacgtcagaggcgattcccccaagaagcggaaatacgatcagttgagctgctttctgttgtaagaatggcacaggtctccagcttaggggacccaaagacatgcaatctcttctttcacagatggggacttaaaccctgatagatccagccaggatgaagcttcagatgtgttttagaactgatcatcccacaactttcagcttggtagaacaccagtgtgcctgccagttttctgtgactgtaacaaaataccaaaaaaaaaaaaaaaaaaaatcagctttttaaaagatttgttcggctccaaaattggaagtttcgggctgggattctctggttctgtggtgaagtggtgcatcatgggagaatgtgtaacaagacagagctcttccgccatggccagggtgccagagagaaaagaaggagccaagattccacagtccccaaccacattgtcctaaaaactcccaatagactccacctcttaaaggttctactgactctttgaacaaggtagtggtctttggagactttcggaatcaaattgcagtgtgtgttctttgtctaacctttaacgtttgaagcagttttggcttcaggaatgcccattcctcatgtagaaaacaagagttccatcctgttgttccaaagctttacagacataacacatgtcttagctaccgctctattgctatgaagagacaccatgaccaaggcaactcttagaagggaagcatttaacctggtgggctggcttactgtttcagagggctagtccctgatcgtcatgatggaaagcaggtaggcatagtgtcggagcagtagctgagacctttacatcctgttctgcagggttagggttagggttagggtagggcaactggggctggtgtgggctttgaggtttcaaaaataacaaggccacacctcctaatccttctcaaatcggtccactattgagggacccagctttatagcctatgagcttatgggggctgttctcattcaaaccaccacaacctgtcaatcagctgcaaatgtgccaggggccaggggccaggctcagggagtggctaaccaaggaagggatgctgatgagggccataagcaactgcatggcaccatcaagttgagtgattgcaagtgcttaaagtgtattgactagacttccttactctgcctacactcccccaggcagataggaacggttttgtttactgtgagtaaatcaaacaaaaggcttgttgggaaacaactgtggcccaattaatggctttgtttatgtgttggctttccaaagggatttaaaaaaaaaacaaaaaacaaaaaacagttttggttcattaagcaccgttaatgtgttaggctcagaattctattctatgaagatgttctctcaattttaactttattaaacacggcactgtagtgtttatgacagctaatttaatcactctcatttgctcagttgccacaaaacaatggagcaaggctgacaaattagaaaacctccttctcccgatactcagagctatctctgcgttagactcagcttttccccctcattcttgggattagctggatacctggcttctgcgttctcttcagcgcatagcagtgcttccttccagtccctgagctttctgttcacacagctctgggctctcccaggagcaagagcaagagacgcttgactagggtccacagctactaccgctgcctgtgttagaggctgtccctgtctgcaatcagggaattgtagggaattctagagaaccacaggctcagagtctcgggttgtggctccctgttgacaggccacactgtggtcttataatctttacctttcttcttagttgttttcccagataaagtacaacccgtaactatagtcacacacccagcttgaagagcagagcaactcagaactaaccagaccttttacttaagtctctttttcaccttagtgggactttcctttgatgagcctatttggccaaaactaggtcattgaaaaaggagagaaaggggaaaaaatgtcccatcgcaaatatgcttccagtttcaagtcctaaatgttctgggtgcaaataactaacatggcagttcagactccagaaggaggatgtaagcgcgagaggcgaggtgtgaagattaaggctatgttttgctcttgcagaatagaagacacttcactttataaagcaatttgatttcctcccttagtctcttgcatgggagagacctatattttaaaactgcaatcttattttcttttctgtaatgtcaggagtggctatgccctgtggataaactggattaaattattttgaaatggatccatccaattttcacatctgggacaactaccccatctctgcagagatggaggtctgataactcatccttgctaagcttatataactagctgactcacccagtgtatttgtccttaacctgctagacagcactgagcaatttgaggttgttgttcctggagagatctggggttgagcatggctgtcggataagcattaatgtgggatttggtttacagtttatttgggtccgggggtggnnnnnnnnnnnnnnnnnnnnnnnnnnnnnnnnnnnnnnnnnnnnnnnnnnnnnnnnnnnnnnnnnnnnnnnnnnnnnnnnnnnnnnnnnnnnnnnnnnnnnnnnnnnnnnnnnnnnnnnnnnnnnnnnnnnnnnnnnnnnnnnnnnnnnnnnnnnnnnnnnnnnnnnnnnnnnnnnnnnnnnnnnnnnnnnnnnnnnnnnnnnnnnatttacagagcccgtgccttgagtcttcccttttaaactctgtcttgcccacagctgtcggtttgaagcatgtgacttctgagtccttgtcttccattctgtattcccgccatcccacctgacctgctcccagtgcattctggactccttccctcttgacttctcacttctcccaccagtgggcatggcccagctgtgccctgagagtcaagtcctttgactggttttctgccactcagcattgagaacttggtgtgctcagatggtgccaggctttggaaactcagcagtgaattagtgaagtctcgtgagcctgctgtcgggtaggctcatgggataggcgacagagcatctccagtcagggctcgggctgtttgtgtcttgaatgcggtcgtgtcctcccatctgaattttcacgtgtctgatgagcctgtgtgatggtccactctgccgcatcctccctggggaccttcctcccttgcgcagtaacttcttaatgacatggatcactaagtgtgtgataaccgcgctgagtgaacacacagctttgaggtcacctgaattgtcttcccatgcatttttgctcgcatgtaactcgttcattattgatcctggaaaggggaataaaaattgttttttttttcatttggggctatataccatgcacacaggatataatctaagtccccagtgtgattaaaattgcactggactgaacaggtgacaagtttctgataagagtgtgttttcttgagtcaggcagagttatattatccaaatgaggagggataataaaaattgttttcatgtctccttgctagtcctttatatctgataataaatgttatattctggacacccagatgggcatgagtctcagcacggttgtctccggccagggccaagtcacataatttatctgccggtcaatgttcatgtcagatagggagcacgtgaccaaccatgttcctctctgaggagtctcccttcctcagatggtgctgttgtgggatggatggtaaaggcagatgttaccttacttgtcccgagtgtgggggttaacccagatgatggtaaaagctggaaatgggcaaacaatcccatttgatgttacttctcaaggactaagacagatgctgcgaacgtagcttagttggcagaactcttgcctcacgtgccccaagtaatgggtttgttcttctgaacactacaagccaggtgtggtggctcacagctgtgatcccaggaatggtggctcacagctgtgatcccagcactggcgacacaagggcagaaggacctagcaactgcaagtcccagctgcgctctgttactagagcgtgagccagcgtgagctgcagggcagcctgtcctgtggtttgttttggctgtgcttgtttatttgttttattcgtatgctcctgttgcctgcatgattgtctctgtgcctgtggaggccagaagagggcagtggagccaatggggctggagttatagctgttgtgtactgtcatgtgggtgctgggaattaacctagagtcctctggcagggcagcctgtgctcctaaccactgagccgtctctccaggcaggactcttgtcttttaaaaacacaacaaaactattccgtgcagagatttctcttttgtcattaatctcactggaccacgtttttgctggcatttagatatcagagcctgccctgccacccccaactcttagcccattcatttatttgatgtgataacattctggttcctttttaaatactgtgtgtgtgtgtgtgtgtgtgtgtgtgtgtgtgtatccttgcatgtgtgtgtgtttgtgtgtgtgtgtatgcatgtgtgtgtgtttgtgtgtgtgtatgcatgtgtgtgttgtgttactagaaacagaacctaggctgagctacactctaaccctatgataaggcatgtcaaaaccacacttaaaaagcctgtcgtagtttacatttccaaagcgttatcatgcaaattgttcaaaagttctagggctagggacgtatctcctccttgtcgagggtcactttgcatgaattacacctgagctcactctgccagcaaaataaataattatcacaattctgtcatatgcctccaagtgaaaactctcctgggctggagacatggctccgcagttaagagcatatgcagcccttgcagaggacctgagttcgattcccagcaccaacatggggttacccacaatcactggtgacctcagctctcaggagattcagcctctctgacctctgtggacaactacaaatgcacacacacacacatacatggacacacacagggacacataaatggacacacacacagggacacatatacacacacatggacacacacacaaggacacatacacatggacacacacacacatatatggacacatacacacacatacatgnnnnnnnnnnnnnnnnnnnnnnnnnnnnnnnnnnnnnnnnnnnnnnnnnnnnnnnnnnnnnnnnnnnnnnnnnnnnnnnnnatggacacatacacacacatacatggacacatacacagggacacatacacatggacacacacacagggatgcacatataaacacagacacacacatacatatacacagatatacatacatatatacatgaacacataggtgcacacatgcacatggacacatacatatacatattttaaaatatttataaatttaaaaatatttaattttaaatcattaaacttctcaacaaactaaagtacaaattgttgttaatactaagaaggccgagagtacttttttaaatcagtggtctttctgtcacttctgttaccaaccctcctaccttctgagagtgtttgctgactgggcctttacaaatgatggtcacttttgagatctgccactctgagtgtcatttgtgtgtttcaaacccggtgggaaggggaaagacccatcttacattttaatacattcagtaggaagttagacggggagcagttgttataaattcaggctggagagatggctcagcggttaagagcactgactgttcttgcagaggtcctgagttcaattcccagcaaccacatggtggctcacaaacatctgtaatgggatctgatgcccttttctggtgtgtctgaagaaagtgtctgtactcatataaataaaataaatcttaaattcaggcagtctgttacagtcagaggagtcagggtccacctccgaagcgtgattttaagtttactttttgcttctgcagagtagaaagttcatcgttttgtaaagtaagttgactcatttacttagcccttagcaaaggagagacctgcatttcaaaactgtgatttcgcccttcgttaacgtcaggaggagtggctatgccctgtaatgcaatgcttaagtaaaattacacattcggggcctctaaattggcatgccaaattataggacattctaattattatgtggatgtgacagattcaattattcttgaactcttttgagaaagcagcccttagcagcaattcacagtagtaaacaaaagattaacagaaaaaaatgccctttaggggactctataaatgtttccgattaaataccatgggccaaattaactgtaatatccagatacagaaaaacaaccccagccctgcgtagagtttcagtggattctctcgaggtggatttactctaaacacagcccagtgaagaacggagtaagtaccacctacttgggagctgtttccctcggtgggtgcgtgcgtcatttgggccagctgtctccaactctctcttctgtctgaaaccattaaccaaagccactaataagtggacgagcgcctccctccacctctccatccccagagtagaccaatgagctgtccgctggctgcaaggccggcagctaaagggagagagaaggaagccagaaagggaagctcaaaagatacccagccctgtgcccttcagaacgagctgccccgaaggctgtgcgggcttgaggtcatcagaattctgagctcagtgtctctattactttcttagtcttatccagagagaaattagatttctatcgttttcttctgtgcacagcattgctgaagtcgcttgtccgtcatttactggggttgactgtcatcaggcttagtccccgtcatccccaccccccgccccccaccgtcagccccaaagaacctcaggaagcgcatctcccaccagctgctgctcagatcctatccatccagcttggtgatttactctcaagccactgttgcttggctcttctgacatgacccatgttctattaaacaggctgcttctcttcagtccatagattccttagctctgcatgtacgtatatgcaacccctcaaagctcagagtctgagggtttttaaagcactaaaagactccccgagcagccttggcattcgaatgcatagagcaacagacagctgagcacccctgtaataatagtctagaactttcatttttctaacttccctgtaacattaaaataataaaaggtcaggttggcctttgtttgctttgtagctcagggtaatcaaacctttcagggatcctccaggctaccacccaaatagatcgtctgtattctccctggccccgcccctttccgaagcattgtctgtgtgataatatattgctgcaagacattgtgtgtctcagtgggtttttttctgctgatccccaggttttggattcaggaagactgaaagaatatgatgagccgtatgtcttgctgcagaatccagagagcctcttttacaagatggttcagcaactgggcaagggcgaagccgctgccctcaccgaaacagcaaaacaggtgagttggcccagcagccttaattacagtgtgtctcacccgttccctcctcgccatttggcaccaggggtctggtttaaaaaaaaaaaaaaaaaaaaaaaaaagcactgtgtgcccttttcaattataagcctcgggagacaaagcttcaacacgtccagggttgaagtaaggtctaccaggacttggcaggagcccccggggaaggtgtgtgcacatgtgcacgtgcaagcaggcgtgcccgagagggcgtgagccctgacagcagactcattacatttctttctcatggatgcttaacacattgcaatgcaggtattgttgggattcatccaggaagttaggctaaggtgaaaatggaatatgtttgttataaaaaggtctactagagagacgtcaggctgcccctgttcttttccttaaaattcgtaaagaatagtagtatcgcttgctcctgcctatccctataaacctttgttgagttttgggtccaaagaaacctttgtttgtcttctcctaccttctggagaaggtaaatgcgcaagcaggatgtatccagcattgattacacctcaagcaagggcctagtgtgtggagtggaaaggctttaaggacactcagcttgcatgggagctttccgatgtgcacccatgggtgcctcgggtaactgcactctggtctaagggacttactgtcacacagctgtaacagtaggctccagaatacaggtgtggcttttgaccttcatccctctatatttctccgatttctcaacaatataggcagaataaaattgcttggggttgtgtaacatcttaagtatctattaaagacaatagaacaagaaaccacgtgttagtatcctgccagtcgtgggtgagcagtcagtcacacctaaaccctaggctccccttttaccaccgtatcagctcattacaaataggggctggatggagagatggctcattagttaagagcgtttgctcctcagtcatgtgggccagagtttggattccagaactcacgtaacaagcaggcattccactcagacatcgtgtgcacatcccacaggcgtccctaatcacgcagacacacccgacacacgaataagtaaagtcaatttaaaaactggtaagttaatgggttgtgcgtatataaaagtgttgcgttggctaccatgtgcgaagcgtgtgtgagcatacctttagtcatcggtgataacagaccagagaaggccagcgagtgagccacgaaggtgacagcatcggggaacaaggttttgatgctcattagatgcagtgctttgggctatggttcaggttctctgaactttatgtctgctgaggaagctatggcttagagaacagaagggaagaacccagagtcacaaagccagtaagtcactggaagccatgtgttttaaaatgtgcttcacgttgtggacgagatggacgacatcttgaggcggcaaagtgtgtaaggctttttacagagaatttagaaaggaaaacagaagttggaaccgtgttcgggaccaaactttcactcctggcaatggcaagagcctcgtccaggttctccgatgtagcttttgggattaaatgatttgacaactgtttttaataaccagcctagcagataatagatgacaagggtacagaattttttatgtgtacatgtgtgcttctttgtaagagtgtatacatgcatgatattaactataacagttgtaaaactaacatagtaactacaataattatgctacttgtaatataaatataatatactgctttagtcatacctcggttttttgcacagtcagcttccatcaaagctctgtttcatacatagagtttacagtttaggtttgatttcctttttatcacagaaattatttaagaggaacatctgctagtaacataatagctttctattttagttaacatttacactgtcattgttctgtagtaaataatgcttacttctctcctgtcagcttacttgagataattcattctttcttgtgccctggtgccctggaaatctctataagaggttgttttgtgtgctctctcttagcaatgatcagcctagtgatttttccgtccatctgctttaactaaatggtcctctctgtccctacattagtttttctcatgtgactcctatgtggaaatgaatgtcccatacagacagtatatgcctctctttatggctcctctcacattcactttgaatattcttatttttctcaacttgcagatatttatgacttccgttatgagttatactgtctacaattcgagcagtctttctgtgttcgtgtaaggccttcgggttttaattctaggctgctcaacgctgaggtggagccttgttccccttcaccctgtcctcatttgctgcatatgcctttgtcattaataccagaaatgtgccttccatacatgtatggtattgggtttcgttcagagatgcaatcctagcctttctacaaagagatggctttaacccatttgcatttattgaagtcacaggtatgattgatgtctgaaaggttcatcatactgggcattccgtgcttttcatatgtgtgtcacattacccttgtcaacttcataacaccatttctccttaagcttcttgaaatactaattccagttactctgcttgctcactcaatcccgtctccacgtctcactctgtggttcttttcctcagtaagtcatctccaggctgtcccttgtaaaacagtcatttctgtcatcttttcctttctctcttcactgatgacatccgtgagtcagatttcacctccaggtttctcaccctctgcacaggggcttctgctgcactggactgtgtcgcggatgctttcctgaaaccgtcatctgcacgctgagcattcctcgttatcagtttgtcttgatccgtccttcctctcacgtatctattttgccgacctgtcttttcattattgtcaccactttttacttctggataaaatggtttttggtcttttttttttttttttttttttttttatcctaatcacattgctgcaggatggttgcgaataggacattgtttcagatggcagtctataaactcttcctatttctctatatcttagatgtttaaggtgatttctaaaagagtaagactttgctaattcattgctcaataatctaaaaagcaggactaagcctctagtattaacttgacagcagtcccagtggcgggaatctaactagacctgccttacagttgacgtgcacgaggccttgagaatcagtgtgagagagccagagttctgctggtgagcgaggctaccctgacagtctggagccagaatgcagcacaccaagtggtatcttataaatgcagtgtcagtggaagccactgctctcctctgtccacaaggggaaagttgtgtttttgtgatgtagcatgtggtacccgatggacgagtgaatggctggccttggtttcagcccacatcagaggaactctgtgaaaagaatctaagcaaaaggaatgaagaggagcagaagattagcccccagatttgagtatgatggcagcatctctctttccccatgtcctggtgaggcaccattatcgttggccacatgaagaagctgagggagaaaagcccagctaagggttcagagttaccagccagcaggccctagtcccccaagccccaggcatctcctagcctgccttcctgtcttcccgcctcccaggctaccatattaactccgttaacaatgtctcaacaccaggcccgggattctgcaaagatcctctcagaaggcccacaaaaggcaatcagggctgaagcggtttcacgcttctgctctgtagcattgctttccccgcactgaggggctgcctctcaagcagccgtcattagcacacccagcacttagctcggcatgttttcagcctgcagtttgtagccattaattagttcctatgaggtaagtctttgttatctcgtttttacagatgaggcagacagtgtggagggaggctgagtggatgttgcagtatcagctgggtattcaggaaaaagacggagactggttccttttagcctaggctcggcctgcggcttgagggccccatagagaaagtcagccatcttttggcttgatctcatgtagatgctgtgagactgggaatctacaattggtagagtgtctcgcccggcatgcattaatctctgggttcagttcccagcgtcgtattgctttttgtttttaacggacaatagtgatgatggcgcatgcgataatcccaacatgtggaggtggaggaaggtgttgagagttcaaggtcatcctcaggtctacggcaagttcaaggccagcctgagatacttgaaaccctgactcccccaaattaaaaacaaacaaacaaaaatttaaattaaatttagaagaaggtgctcagtctcaaccacaccattatccagaaagtgttataaatgtggtaggagaaattcaagtcagaaacggttctcagccattttagtaaacgtgcgtgtgtgtgtgtgtgtgtgtgtgtgtgtgtgtgtgtgtgtgtgtgtgtgtgtgttgcctgcatggatgtgtatgcagcatgtgaatgcagtgcccacagagtccagaagagggcgtcaggtcctctggaactggagttacaggcagacatgactagccctgtgggaaatagagagtctataggtggagattatgtgaaatttgaatacacagacacaccaaaaagaacaggttctttttatgttcgaaagcatgtgttagggaaatagtctcaaggttgtgctccagtaggctctttcttcttaagcgacatttccttcataaatggaatcttccgtgttggggtctttagggagaagtctgcaagctagtcaagggagggtacttagtggggaagtaggtaccagtgaccttgaggcctgggaagtccctcattcccactgataactttgtggacagcacccacgaatataaatccacagctggaggtttgtaaagtggatccggcatcccgagacccggctcgtgacatgtgtcagctcagagagatgctgcatttttctgttttaaagactcaaacaaaacttttcacattctcctttgaagggaaaaaaaattacatttgaaggcctttttcacgcaaacacatttggagataagagctcacgagtcctgacattatttcattttgtaatacacatctgtcaaggaacccagatatgatacagccgctaaaaactgatgattggggaacagagagacctgacagcatttcatgtcctttatgttccgattacacgtttatcagagagcccgtatctcttctattgcagcttggaattggcagaattcaggaattcaaaggcttggcaaagagctgtcctattatttggtatcatcttccatttgagagaagtcgcctggttgggtcattgtcacagcctttgcttctcttttcattactgtggtccgctatccacagatcgtggctctataggccccacgacggccttgctgcacaaattaagtgccgggatatttcatacgtagaggccagagtttcaatgcttgtcagtcagggtttgtaatatatagggattacaacctgagattagcatccaagcccattgtgctcattttatgcacgaaaatgagaaacttcagtacagatgcccgatcgcctggcctctttgtcatccccccccttcctgtttttaaattatctctgggttttgagtcagtgaaatgattttgcttatcagtttagtggcgtgataaagcatatctgtgaatcaaagtgatcagaagtaaagtggatctccaagttgttgggcattcagcaccgccatgcagagggttttggctggcatttaacagcttttgtgcttgcctgggcttctaactgttcctcaatgagccctgtgatttcctggatggagacagacaggcataacctccaagaaagagaaaggcttgaaaatttactcatgttctgttttttgcctgcctctttcccacaggtatacttcagacggaattacccagatattacattcaccagccccgcggttatgaacacctccaatggacagccctcggccttaacaatatttgaaacagcattgtgaccaccaggacatcatcgtaaagtctgtcttgaaggtgttccccaccccgcccaggggcttgcacttggaggactacagcacacctggtttcctttctttctgccacagatccttcacagacgagagactgttgtctttggatttttccctccgactttactctgtgatttcaggttctaacaacatggcctgtcgttttattttaaaagttcctgctgttctttacaaatccagttctgaggtgcaggccaccaacagcagcgtctaccaggttttgtgccttaacagtctcaagggctgaagcccattcattttataagctgtcaccatgggctgctgcttcctcttgccttaaaagtacactctccaggtgtgtcagggactctgtttacttgaagactgtgtgcagttgccagttcgtctccctgctgtctttgagctaggactcataatttccctacaaaggtctctggttaaaatagaataggtagaattaacaagaaccacaacaacaacccccccaaaaaataatccatataatttaagtatattgctggagagagactatcccaccacctatacatctacaaagatatatgtctaaagttggaaaatcaacttctgctttctcagaatgggagaccgagcgcaggttaggcacccctcccccttgcatctgtgagtccctctgggcggctcgtgtactgatcggatctgtgagtccctctgggcggctcgtgtactgatcggatcggcaccatgacacttcccctagactgtgactcccaaatgcataatattaatctcatttggcttctggtttacagaaggtaaagctcctattggctgtgagccgttggtgaaatcctttcacatcgacaccaaaagctctccccagctagtgaaaacctgaacatcgttagagtcaccgactttacatgctcagaatgctgtgcacaagccacgctttctaaagcccatccagattagtttagctctgaccactaatggcaggtcttaaggaccttgtgattagtcaatcaacaaaccacaacacttcctaggacctgttgtactccgtgtaactataggtctgaatattttctgggtggtggtggcaagggtctatgtcagggttcaagttactaaaggttttactgtcataatttaaaggggactcttcacgacccgtcacaataaaccattctcaagttatctatgtgtgtgtgtatatatatctcaggtttttagactggttgacagaacaaagcctgttttaacagtggaaccttaaagagcacacctacaccaaaccaccaaaaccacgccgagcacagtgactgtttgactcttggtattcagaagtctgtaatgaatgtaattatgtttaggccagtaaatgatgtagattcgtcctttattggtagtcgcagttgatatttcaagagagtgagatgccatgctgacaatattaagatctatttgaatatttagaaatgtcttactgtatatatgtttatgtttatttggtccttagagattaaaagcggtcatacaagtatgttcctatttcatttctatttttcacaccatcacaggacaaaccaaagtcaactgaaataaatgacagtttccatccccattcacagatctgtttgttcgctgagggattgtgatctgactcatgtccttgctggcgaaagccagtgagcttttgtgagatcaaaaggtacctaccaccaccacctgtttctcttggctgcctgggtggaccagattgtctaaagggaggcgtgggttgcagacaacctgaaacagttgctcctgaagctgtcaggtaactctcctttccagaaggggagtattagctcacgccccaaggcctgaacaaacatcaactggatacagtttgtaggttttttttaaaggtaacgtttccctcacactaacagaagaatctattgcctgcctttccatttaaagcactgttgagtgttggttctgagcctgggtaacctgggccagcaactccgtctagaaacttgtgagaagggagattcgaatggcttacatctacaagaaccatacctgtgttgtggggattggtgatctgatttagaaattatcccgattcagagaacaaaacgcctcagagctgctgccatcgagtcttaaaaaccctaagccttctcaggacaatctcagggtccactcagaggtgagcaagaggctaccaagcaagcagcgggaacactcttatgctgcatgaagttatttataaaaacaaaaaaacaactttggcccagtgagatgactcagcggggaatgcccctgcctccatgcctgacagcttgagtgtttcctgaatcccacctggggaaagaactccaatcctgaaagttgacctctgacctccatagcatatgcacatgcccataacacacacgagtaagtgaatcctttagacaaacatcttgatgacatttgctcgaatgtaggcccctatgatctgttctctgccctggtgtgcacataaacacactacccactgtatcagcaatgccatcaggaacataattccaagtatttcagcctgtaggcaactgaaattctcagcagcagtagcaggtggtgggacacagccatgaaaacacctttaactctacaagttttggcttcttggggatacagacacatacatggcacatatatacgtgagcactaacacacctaaaacaaagttagaaagaaaaccacaagattcccacatttgctcagtgggcccagttccctgtgtcaatactgaatactgttctttaaaagagccaggatcaagacagagtcgatggcttccaacacctcctctggaggccctgattaatctcagtgtcccacttagcagcggtggccttcttcaagaagccagcgagataaatctcaatgatccatcacaacagatagaaaggaactgatgattgtaaaagcagcgtttgcttgattcagaagctcatcatagttatttgggggagagaatcacatggaaaccattttaaaattaaattttaaaagcaaattatgttgctgaaaactaatactagcccatgtgaggtagtgcgtatgtcctgttagtagcattttaaggaaggtggggggaggccacagaaagctagggatgtaaaaatgtttcaatttataataatgagtcaattaaaaataatctacatatgcacaccaatgccagttagatgggggaggggagagatgggcagacgaacagacagacggaagtaaacactttctgtaatagaatgacaggagctaaatatagaaggatcaatggaaaaatacctgtggacccactgttgtcaacggtaactcaaactattccaacactgtatttgctaagtgaacctcgtatggatattcaggtagaaataatgtctatgtatgcgtggaatgtgtcatcccatagtaagaggaaaactttatgtttaccatgcaaaatctgacagacaccctcctaaccaggcagccaggtccaacctaaggaaggaagctgaagtcagccatagtgggacaggcagcagcctctctcttgatgtgtgcagccgtgtttataccatctcacgtctgtgacacacctgccacaagcatgatcagtccaacagactcaaagtgaggacactctacagcacacccggtctgtgctccctgaaacagcctgtagccattagaggtttcagaagtgttccagtttaagtgggaacttaagacatgctaattaaatacactgtgatcctggattaaaaacaacaacagtaaagccagtaatggcagttggtaatatcagggtgagagctgtacagttgctaatagagttttaacagtgttaaagcaactgaatttacttcttacgatgtgctatgcaacaaaaatagccttagggaatgcacactggtatggttatcggaaagggcctatgatatctgcaaatgtgattatgtgcatatgtgcatatacatagtatatgtatgtgttctatatgcataggatagagtatatgcatatataacacatccatgattgtggagtgaaatactagcaggagaggagacaaacgaaggatacgaaatttcagtgagagcccagattaaagacacagacaagctgactacgttactgaactgttttacactctttgttcagaaggcaaagccagaagcatcttctgcaaatagaagcctctcagaggtgggctgagcgacccctggctctgtgggtatcatataagtcattaggagatggtttaatattatgtctatttagcagcacgagtagcagactctctcctaaggcctatgacctgtcttagctcaacaatggtgcttcctaaatatgaaaaggaactagttcttttcatcaccttgcatagattcctggctaacccatcagactgcaccggtagtgggctgtgtaaggaagaaacatcacagctttattgctacatacctatgttgtgatgatatacgatagtatacaagcacagaggagaaaggctgagtccgggcttccatgattccaaacaggaaacgatgtcttggtgatttgagatcacattagaaaaaagtaccaagatgtctgatgtaataaatggagctccacatctctggttactttaaagtcctactgaaacctaaagggtgtttgatgttgtttttattaatagcatttccaactgtttttctttattgcgttattggcaaatacaatgaacacagaggagctgccatctccaatctgcaaggattaaaacagaatagtatctcttggcaggaatacagcagagtccacgctttcaccttgagccagacatggtggcccatgttcttacttgcagcacctgggaagcagagacagggcactatctgtgactacagcacagcgagttctaggccaggcaaggctacaaccctatctcagtcaccaactaaacaacaaacaaacaaataccagcaaaatgctggccaagttgtggaaggtaaggagaggacctgcgtgctgtcctctgtcctccacatatgtgccacatacatggttaagcatgtacttgtcttgcagaggacctggattccgtttccagttcacatgtccatgtggttacgactactccaggggacccaacgcactcttctgacactgacactacagacactgcactcctatgcacacacccacatagagacatatatgcacacactaattaaaaataaaacaaacaaacaaacaaaaaacattgctgaagagttaccagtgaggaacacaacctattttatgttggtgcaacaccatagcagccacaatactggtctaggacttaacagtcatctataaaatagtggctcctaaattgtacaatgtatccagacttgttgccacacgtctttgccggaggttcctaaaattacttatcaggcaaagggaaatggctaggcaaatttttcctgggaaacatggtgtttccccagatcaaaataatgccgagctgctgatttacatgggtggggcagaaacaagtggcaactagggacctgaaacaataatctcattttggtggaatttggactttcaagttgttctcaagctacgaggctgctggggtgaagactacattaacaggccagccatcccagccaccaaggcagccacagcaagaagacaggacagctgtccatagacttagccctttaaaaaaagactatgttgtcattagaatggaataaattatgcaaattatgggtctcactgactttttttttactggatattttatttatttacatttcaaatgttatccccttttcctggtttcccctcaagaaagcccctatcccattgcccctccccctgattctctgagggtgttcccccacccactcacccactcccacctcccccaccctggcattcccctacactggggcattgagccttcacaggaccaagagtctctcctctcattgatgcccaacaaggtcatcctctgctacatatgcggctggagccacaggtggttggtggtttagtccctgggagctcttggagggtctggttggctgatattgttgttgtagacttagccctttaaaaatattatgtcatcattagcatcgattaaattatgcaaaaaaatgttgttaccatagaataaattatgcaaataacaggtttcacttagacattttcatgaaagcacattatgtagtttgatccaactcaccctcagttaccctctctgtttaaaaaaatgattatagattatggatttgctgctttcttgtttatttgttttcatttatttatttacagagctgggaatcagactcagagccctatgcttgctagttaaggactccaacacagcaattttttcacctgtatatattcagggggtcgggtatggtgagctgatacatgcagactgcatctaatgatgaaatcagggtaacgagcctttctcggtctagcgttggtccccgcccactcttctggagttaaaagtgtgcatttagacttagctaacaagacttggttcagatgttgccaattgtgttagcaacacccaaagcatcacagcaggaggcataggaaggagtgcttcctgatctccatcagtggggcgctgatcttgacttcacctatgtgtctgtcatgttgaccttggcctccatgttgctgctgtctttggtcttcatggtagacttggaggtcaggaggacttcacagtggagcagtaatagagctggtttctcctggcctccaaccatccaagactgtttccagagccacagggtctctgctggcacgtgacactcgggttcgcttttccgtggaatcctgtcaacagcagctggggctttgtggcctttgcttggttggcttcatctctgggagggaacgaactttcttcaccttcggtaccactgtcacctaaaagctagttttctttctcacttatgatcccacttctctaagttatagtatcaggaccccagcgtaaggagttcctgacccttggtgttcagatggagatagagcttttgagagaaggtccttatggcagtcagccatgcctagtaaagacaattggctcatttaattcccacttcttcagggctaagcttccagttggcaagccacaaaactgcctgtgtactatgcttgaaatagtcttgagaaactcataaaggagccctcactggccattcatgctgatgccttgtgtctttgagttcctttaaaagttcttattgtttgtctatatgagtatattcttggcatgtgcactatgtgtgtaatgcctgtggaggccaaaagagggcatcatcccctaggactggagctacaggtggtttgcgagccaccacgtgggtgctagggatcaaaactcagttctctggaagagcagcaagtgctcttaatcgctgagctgtctctccagttctttgagttccttttcaaaatatgactgaatttttatggagataaaaagtataaagttgctggtacttcagtgtgagagtttatcaatgctttcttcctagtgggaacagcaatagatgccacacgtggttttagagtgtaggtgtttttgacccatccttggaagacctgacatgactcatcaccaagaaagctacttcaacaacctgatttcataatatcaaatcacaataaggaaattgccagtacccaaaaagagattaatagataggacataagaagttgaagcagcctgcacattatgctgccaaatacataaatttaaacactatgcatctgtccatcttgtctgttaattcgaacaatctctcaagtccacactggctgttgaagaatcttgaggataagaacaggaagttaccgtctgggagagaaggaagtttggagaagcaggctgtttggtaaagacaggtttgcttgcttaagtggccaaggagatttgagggcagccagttctcactcagcacaggcaggctaaacatggtgtctggaccataatagaggaataatcaatgttggttgagaaaaaatgaacggctttcatactgagtgttagtggaacaagttcatttctgcctgttcgtgaagctaatccttattttaggtcaacaactgtcaccaacattatcaacattaaacaaaaaattcagatgtaatttaaacttttaggctgatgattaaagagcatgcatttacgcatccaggaaagctccatgacattgattccttcctgccgcgttttcctcttctaaggtaggaagtgtctgctagctgcagtgctcagccataatgctttctagcccagggcaagaacacgactagcagccaccaatcacaaggctcgataggtaaatatatcaaccacattaacgaaatgttgagaccaatacctgtgaaccacccccttaactccaagttgaaatcacattaatgattacaatgaatcttttacaaaacaaacaaacaaacaaactccttccttaatatctggaagtcctgattccatttttcaattcctttttaagatttttagattccagaacttgccttttcgtcctgaatcagggcagcaccgtgagagccccacagccttgcaaaggagggctttgtgttcacaagaacactctaaaggacaaagattgaccactccttctagcctcacaaatggctcagaccctgggttactcgtgctagtagtactgctttacagtgtacccttgcaaggatggaatcaagcaagaggcccatgtaggtgtttgaagggggctggcaccatttgggcgggctcttctgggttcttgaaccttgaatgtgcctctttctacctgataggtgttaaaatggtgaagatgtggagcagggcttgagagcttgtgtttccaaactgccaagcaaggctgctgctcaaggtttgtgcgtcacactcggacagccagtgtctgaggactaaggcctagatgggtgtgttcttcgggctctcggaaatttctcaccagagtaaccagccagcacctaggagagctggtgggggtcctctaaacagcaggacccagagtggaggcttcttgttaggaccacagactggtcctagccccttctttgctagaatcacccttcttacccaggcccgccctcctccttcttcgtcccccctccccctcgtgccaatgtgctgttcccataatgctgggctccgattctcctccacccgctctgccaccatttcatcctttgatctcccacccactcgccccaaagtcaagtttctcttggctcctttctcggctgctctcccactccttcccacgcttctctcttgcgacacaaaacaaatgtaaaataacatttcaaaaatattaaaaatcgatgctgatgaaatcgcggttttgttttcttggaatgggaggcaacaggtccaacaatcgcagacacagattggcctgcgctgtaccattgtttctgggcagaaccctatctgttcacccatgacctgaaatcagaatttccaaacagaaacgtttgccggattagttagggcagactaagtttttctcccataattttattttgacaagaccatgaaagctgctatcgcctcatctaatggaatcaaacaggctgctaaaaataacccttgcaagcttttattacgaacgggaaacacctcctcctcccagcttgcgactgtgatcagcttaatccttcaactttgctgcgaatatttgcactgctctggggttcttttctttccaaggctggtttgctctgtttggcagagttatttgaacaggtggctttgcacaccctatgctaatggaggcttttgtcttccttcaatcagcagagggagccgttctagaaagaaacggttctttgatgctaaactattcacacctgtttgattatcacctcgcgaatcacaataccaagccaggcagaactttctctaactggacaccagaagagatgcgatctcctttgcatctccaagagcatcttttcgagacaagcatctccaagagcatttttcgttgcttagggcaagcgtctcctgtttccatcaggcaacggaaagggcattaaggaaggtttgggggtgcctcgtttgtaaagagcaggatgctaggcttcagaggactcaccagacctagttctccggcttgagcccgcttccccttccctttcatccggggacactttcagcgggagctccgggcagacagtgcgcgcgcgcgcgcgcgctaggtcggggatgcgcttggcgcgcgatcacagggtctccggggacgccccgcgcgctccctggctgcagatcacaggcgccgccctcggccggccagcacgggaacccgcctgctccctggcgcgcgatcacaggcaccgggctccgcaccctgagggccgggaggtggcacggccccagcccttgaggagagcaatggctggcgcgttcccacgggaggcccaggaccaagcagggacttctaccttctctaaaaagtgtcttccacaagtgacaaggtggcaccagcaagggcggtgggcgttctgcctctaaagcagctttgtagacacacctgattctggctacgttggtgctgcttgagtatgaacttttggtctggtctgaacgtagccttttctagaactatgtttttgcatctcatgaaaagaatgaatgaaataagtgccttgcagtgggcagagactagcttggacacagtttaaggagatcagacttgtaggtgtgctcatgatgatagtcagccccacttcctacaggcctgcaaaggtgccttgtgtacgtgcatgcgcatgtgtgtgtgtgcgcgcgcgcgcacgcacgcacacgcttatacacttgagttttgtgcagatgaagcccaaaagctgacatatactgttatctattattactctccgtctttttcagtgaggtagggggtctctcaattaaacccagaatttccccagtctggctagtctgtgcagtcagtttgctctggggattcttgtccactcctgctgcgctggaattgcagggaggttgccgtgccaactaagcatgtctgtggattctagagacccagagttcaattcttatgtttgctgacaagtgcttcaactattagcatcttctgcagcccggattcgatttcttcttttttctttctgttgtgcttgtttgctttgttttgtctttgggacacaattttagtgtgccactatgaagaatggatccaaggaggacaaacaagaatccgaaactgggggagggggggggggagggggaaggatggagagatggctcagtggttaagagcactgactgctcttccagaggtcctgagttcaatttccagcaaccacatggtagctcacaaccatctgtaatggggatcccatgccctcttctgttgtgtctgaagacagtgacagtgtactcacatatatgaaataaataaataaatcttttaaaaagtcagaaactggtgtaggttaaagaataaatcgtgtagaggttgaaaatcatagcaaattgtagaaacttgaaggactaccatgataattgaacagatgca

SEQ ID NO: 1233 - DNA, 5629 bp, Mus musculus
ggttcccggaagccgctgcttgcctgcgaggctccggccgaggccggagctcgagcatcctcacccgcgcttcccggaatgctgccggtgcacaccgaggtgaaacccaacccgctgcaggacgccaacctctgctcgcgcgtgttcttctggtggctcaacccgctgtttaaaactggtcataagcggagactggaagaagatgacatgttctcagtgcttccagaagatcgctcaaagcacctcggagaggagcttcaacggtactgggataaagaacttctgcgagccaagaaggactcgaggaagccctccttaacaaaggcaatcataaagtgttactggaagtcttacctgattttgggaatttttacgttaattgaggagggcactcgagtagttcagcccttatttttagggaaaattattgaatattttgagaagtatgaccccgacgactcggtggctttgcatacagcttatggctacgcagcagtgctgtccatgtgcacgctcatcctggccatactacatcatttgtacttctaccacgtgcagtgcgccgggatgaggctgcgggttgccatgtgccacatgatttaccggaaggcactccggttaagtaactcggccatggggaagacaaccacaggccagatagttaacctgctgtccaacgacgtgaacaaattcgaccaagtgacaatcttcttgcactttctgtgggcagggccgctgcaggccatcgcggtaaccgtcctcctctgggtggagataggaatctcctgcctggcgggcttggccgttctggttattcttctgcctctgcaaagctgcatcgggaagctgttctcgtcactgcggagtaaaactgcggctttcacggatgccaggatccggaccatgaatgaagtcataacaggcatgaggataataaagatgtatgcgtgggagaaatcgtttgctgacctcattgccaatctgagaaagaaggagatttccaagattctgggcagctcctacctcagagggatgaacatggcgtcgtttttcatcgcaaacaaagtcatcctgttcgtgaccttcactagctacgtgctgcttggcaatgagattacagctagccacgtgtttgtggccatgactctgtacggtgccgttcggttgacagtcaccctcttcttcccgtcagccattgagagagggtcagaggccatcgtcagcattcggaggatcaagaactttctgttactcgatgaactaccacagcgcaaagcccatgtaccatctgatggcaaagccattgtccacgtgcaagatttcaccgctttctgggacaaggcactagacagtccaaccctgcaaggtctttcctttattgccagacctggtgagttgttagccgtggttggcccagttggagcaggcaagtcgtcgctgttgagcgcagtgctgggtgagctgcctcctgccagcgggctggtcagcgtgcacgggaggatcgcctacgtttctcagcagccctgggtgttctcgggcaccgtgaggagcaatattttatttgggaagaaatatgagaaggagcgatatgagaaagtgatcaaggcctgtgctctgaagaaggacctgcagcttctggaggacggggatctgacggttataggagaccggggagccacgctgagtggaggccagaaagctcgggtgaacctggcacgggccgtctaccaggacgccgacatctacctccttgatgatccgctcagcgctgtcgatgcagaagtgggcaagcacctgttccaactgtgtatctgtcaggcgttgcacgagaagatcaccattttagtgactcaccagttacagtacctcaaagctgcaagccacatcctcatactcaaagatggtgagatggtgcagaaggggacttacacggagtttctgaaatctggtgtagattttggctccctgttaaagaaagaaaacgaggaagcagagccctccacagccccaggaaccccgacactcaggaaacgaaccttctccgaggcctcaatttggtctcagcagtcatccagaccctcgttgaaagacggggccccagagggccaagacgcagagaacacgcaggcagtgcaacccgaggagagccgttcggaagggagaatcggcttcaaggcctacaagaattacttctcggcgggcgcatcctggttcttcatcattttccttgtgctgcttaacatggtgggccaggttttctatgttcttcaggactggtggctttcccactgggcgaacaagcaaggtgcactgaacaacaccagaaatgcgaatggaaatataacggagaccctagacctcagctggtacttaggaatttacgcaggtctaactgcggtcaccgtcctttttggcatagcgagatccctactggtgttctatatccttgtgaacgcttcccagactttgcacaacaggatgtttgagtccatactgaaggctcccgtgttgttctttgacagaaatccaatcgggaggattttaaatcgtttctccaaagacatcggacacatggatgacttgctccccctgacgttcctggacttcatccagacgttgctcctcgtcgtaagtgtgatcgctgtggccgcggccgtgatcccttggatcctcataccattggttccgctctcagtcgtcttcctggttcttcggagatacttcttagagacgtcacgggatgtcaagcgcctggaatccacaattagcggcttccgtgctcactcaacattgcctgttctgctttgcaatccagaggcttggttcttgttcctgacgacatcgagatggttcgctgtgcgtctggacgccatctgcgccatctttgtcatcgtcgttgccttcgggtcccttgttctggcgaagactttgaatgctgggcaggttggcctggccttgtcctacgccctcacactcatggggatgttccagtggtctgtgcgacagagcgccgaagtagagaatatgatgatttcagtggagagagtgattgagtacacggacctagagaaggaggcgccttgggagtgcaagaagcgcccacccccaggctggccccacgagggagtcatcgtcttcgacaatgtgaacttcacctacagcttagatgggcctctggttctgaagcacctgactgcgctcatcaagtccagggaaaaggttggaattgtgggcagaaccggagctgggaaaagctccctcatctcggccctcttcaggctgtcagaacccgaggggaaaatctggatcgataagatcttgacaaccgaaattgggcttcacgacttaaggaagaaaatgtcaatcataccacaggaacctgttctgttcactggaaccatgaggaaaaacctggaccccttcaatgagcacacggacgaggagctgtggagggccttggaggaggtacaacttaaagaggccattgaagatcttcctggaaaaatggatactgaattagcagaatctggatccaatttcagtgttggacagagacagttagtgtgccttgcaagggccattctaaagaataaccgaatactgatcattgatgaagcaactgcaaatgtggacccaagaacggatgagttaatacaacagaagatccgggagaagtttgcccagtgcacagtgctcaccattgctcacagactgaacaccatcattgacagtgacaagataatggttttggattcaggaagactgaaagaatatgatgagccgtatgtcttgctgcagaatccagagagcctcttttacaagatggttcagcaactgggcaagggcgaagccgctgccctcaccgaaacagcaaaacaggtatacttcagacggaattacccagatattacattcaccagccccgcggttatgaacacctccaatggacagccctcggccttaacaatatttgaaacagcattgtgaccaccaggacatcatcgtaaagtctgtcttgaaggtgttccccaccccgcccaggggcttgcacttggaggactacagcacacctggtttcctttctttctgccacagatccttcacagacgagagactgttgtctttggatttttccctccgactttactctgtgatttcaggttctaacaacatggcctgtcgttttattttaaaagttcctgctgttctttacaaatccagttctgaggtgcaggccaccaacagcagcgtctaccaggttttgtgccttaacagtctcaagggctgaagcccattcattttataagctgtcaccatgggctgctgcttcctcttgccttaaaagtacactctccaggtgtgtcagggactctgtttacttgaagactgtgtgcagttgccagttcgtctccctgctgtctttgagctaggactcataatttccctacaaaggtctctggttaaaatagaataggtagaattaacaagaaccacaacaacaacccccccaaaaaataatccatataatttaagtatattgctggagagagactatcccaccacctatacatctacaaagatatatgtctaaagttggaaaatcaacttctgctttctcagaatgggagaccgagcgcaggttaggcacccctcccccttgcatctgtgagtccctctgggcggctcgtgtactgatcggatctgtgagtccctctgggcggctcgtgtactgatcggatcggcaccatgacacttcccctagactgtgactcccaaatgcataatattaatctcatttggcttctggtttacagaaggtaaagctcctattggctgtgagccgttggtgaaatcctttcacatcgacaccaaaagctctccccagctagtgaaaacctgaacatcgttagagtcaccgactttacatgctcagaatgctgtgcacaagccacgctttctaaagcccatccagattagtttagctctgaccactaatggcaggtcttaaggaccttgtgattagtcaatcaacaaaccacaacacttcctaggacctgttgtactccgtgtaactataggtctgaatattttctgggtggtggtggcaagggtctatgtcagggttcaagttactaaaggttttactgtcataatttaaaggggactcttcacgacccgtcacaataaaccattctcaagttatctatgtgtgtgtgtatatatatctcaggtttttagactggttgacagaacaaagcctgttttaacagtggaaccttaaagagcacacctacaccaaaccaccaaaaccacgccgagcacagtgactgtttgactcttggtattcagaagtctgtaatgaatgtaattatgtttaggccagtaaatgatgtagattcgtcctttattggtagtcgcagttgatatttcaagagagtgagatgccatgctgacaatattaagatctatttgaatatttagaaatgtcttactgtatatatgtttatgtttatttggtccttagagattaaaagcggtcatacaagtatgttcctatttcatttctatttttcacaccatcacaggacaaaccaaagtcaactgaaataaatgacagtttccatcccca

SEQ ID NO: 1234 - protein, 1298 aa, Mus musculus
MLPVHTEVKPNPLQDANLCSRVFFWWLNPLFKTGHKRRLEEDDMFSVLPEDRSKHLGEELQRYWDKELLRAKKDSRKPSLTKAIIKCYWKSYLILGIFTLIEEGTRVVQPLFLGKIIEYFEKYDPDDSVHTAYGYAAVLSMCTLILAILHHLYFYHVQCAGMRLRVAMCHMIYRKALRLSNSAMGKTTTGQIVNLLSNDVNKFDQVTIFLHFLWAGPLQAIAVTVLLWVEIGISCLAGLAVLVILLPLQSCIGKLFSSLRSKTAAFTDARIRTMNEVITGMRIIKMYAWEKSFADLIANLRKKEISKILGSSYLRGMNMASFFIANKVILFVTFTSYVLLGNEITASHVFVAMTLYGAVRLTVTLFFPSAIERGSEAIVSIRRIKNFLLLDELPQRKAHVPSDGKAIVHVQDFTAFWDKALDSPTLQGLSFIARPGELLAVVGPVGAGKSSLLSAVLGELPPASGLVSVHGRIAYVSQQPWVFSGTVRSNILFGKKYEKERYEKVIKACALKKDLQLLEDGDLTVIGDRGATLSGGQKARVNLARAVYQDADIYLLDDPLSAVDAEVGKHLFQLCICQALHEKITILVTHQLQYLKAASHILILKDGEMVQKGTYTEFLKSGVDFGSLLKKENEEAEPSTAPGTPTLRKRTFSEASIWSQQSSRPSLKDGAPEGQDAENTQAVQPEESRSEGRIGFKAYKNYFSAGASWFFIIFLVLLNMVGQVFYVLQDWWLSHWANKQGALNNTRNANGNITETLDLSWYLGIYAGLTAVTVLFGIARSLLVFYILVNASQTLHNRMFESILKAPVLFFDRNPIGRILNRFSKDIGHMDDLLPLTFLDFIQTLLLVVSVIAVAAAVIPWILIPLVPLSVVFLVLRRYFLETSRDVKRLESTISGFRAHSTLPVLLCNPEAWFLFLTTSRWFAVRLDAICAIFVIVVAFGSLVLAKTLNAGQVGLALSYALTLMGMFQWSVRQSAEVENMMISVERVIEYTDLEKEAPWECKKRPPPGWFGVIVFDNVNFTYSLDGPLVLKHLTALIKSREKVGIVGRTGAGKSSLISALFRLSEPEGKIWIDKILTTEIGLHDLRKKMSIIPQEPVLFTGTMRKNLDPFNEHTDEELWRALEEVQLKEAIEDLPGKMDTELAESGSNFSVGQRQLVCLARAILKNNRILIIDEATANVDPRTDELIQQKIREKFAQCTVLTIAHRLNTIIDSDKIMVLDSGRLKEYDEPYVLLQNPESLFYKMVQQLGKGEAAALTETAKQVYFRRNYPDITFTSPAVMNTSNGQPSALTIFETAL

SEQ ID NO: 1235 - DNA, 234882 bp, Homo sapiens
tggcaaatatgggggctcatgctcagtactgcttagcagcagcagtgctagtagaagcagcagcaggattagtagtggttggtactcagtagtagtagtagcagcagcagtgatagtagcaatagttgtaataatactgacagtgagtacttgaaaaatactatgtaccaggaactgctatgatttctttctttctttctttctttctttctttctttctttctttctttctttctttctttctttctttctttcttctttcatgttattttattttattttgttttttgagatagggtctcactctgttgccaggctggagtgcagtggtgctatcttggctcactgcagctttggcctactgggctcaagcagtcctcccaagtagctaggaccacaggtgcacgccaccatgcctggttaatttttgtatttttgtttcactatgttgcccaggttggtcttgaactcctgggctcaaatgatcctcccaccttggcctctcaaagtgctgggattataggcaggaatcaccatgctcagtcagaaggcattcttttaaccctacttttgggaagaggacactgggtgccatgtagttatataatgtgcccagggccacacaaagtgtaaatgacagagcccagattcagtctcaggagcgctgacttagggacctaaccatctccagactgtcgtaaaggtgtcttgagaactctgtcttcagagtatccagcacatgcttcttgaacttggcctagggataagtcagatgctaagagctccctggagcagtggggcatggctgtgggaaatcagattggggattataaattaccctaggttcctaggtgtcctggtgccggaaagtcaggtgacatgctagagagtggctggggtgctgggcaggtcagagcaccaaggtacattcaggttgaccacgaactctttttttttttttatgttttcgtctgaggtggggtctcactctgtcactcaggctggagtgcagtggtgtgatctcagctcactgcaacctccatctccctgggctcaagcaatcctcccacctcagcctcctgagtagctgtgactataggcatgcaccatgcctggcttattttttgtatttttagtagagatgaggttttaccatgttgtccgggccggtctagaactcctgagctcaagccatcggcccacctcgccctcccaaattaatgggattacaggtgtgagccactgtgcctggctgaccaagaaccctttagaaacctgtctcccactgagtaccatcctccacatgtgtgaggcgtgcagccctgctgacccaagttcatcaacatccacgctgttaagacaccattcccagttgtctcctcctcggatggacgagggggaagcttgtggtcttgcatggtcacgacattgactgatggtctgggcagatgtcaagttccctgtttttacttatcaaaggctctgggtttcttgcatagcaatgatatctctgcagtttcagaagcctttggcctgaatcgtgaagtgggtgtgcagtttgcttggcaaggatgaagaccccagatgagtcactagtatggggacagctcttctgtcctggtatctgaaccctcccactagcaaggtgggccccaggtattagggcggcaggctaaggtgttaagatggacccacacagtgctggcggcaggcacctctcatataaagtggagcctgggcttttcacaagagagcacttgttggtcctgtgtttacaccaatatcttggtggtttatggtataaaattagacagtagtcagttattctttagaggatcatggtgactagtggatgatgctcattttaaccttgtgtctttaacataataactggtagaacttttagttccgatgcagtgaagttcagggagctaaagctcttcccagttcaactcaaagtaatccttggatttttttttttcttttccttctagcagtgaaaacagcctgaattctagtataaatactattgttttcccagccttgcctattgacacttggctgttttggagaagttggagagaaataatttcttaagatgaaggtagtgagtgtaacatctcaaaagcatttcaggtgttgttttgggttttcaatcattaaagctatttattgaccaggcatggtggtttatgcctataatcccagcattttgggatgccaagggatgattatttgagcccaggagttcccagctttagtgagctatgattgcaccactgcactccagcatgggtgacagagcaagaccttgtctctaaaaaagaaaattaggccaggcgcagtggctcacgcctgtaatcccagcactttgggaggccaaggcgggcggatcacaaggtcaggagttcgagaccagcctgaccaacctggtgaaaccccatctctattaaaaatataaaaattagctgggcatggtggtgggcgcctgtaatcccagctactcaggaggctgaggcaggagaattgcttgaacctgggaggtggaggttgcagtgagctgagatcacgccactgcacttcagcctgggtgacagagcaagactctgtctcaaaaaaaaaaaattatggagttagaacaaatgttagtttcacagttgatttaatgaagatgcttttcattttttggtcttgtgtctgtgctgcttgtggatcttcgtattttggatagtggaagctctaaacttaacctagcatttagtaaaaagcttctgtgatgactttcaggccttttttaacccacttatgccggaggttgccaattttttttgtgtgtgaaagatcagaccttggcgatgaggttgaacagtagaatataaactcccacaagcttagtgttccaataatggaatgctaggcacagatgggttaattcctctggttacagaacaactgtgcagtggatccataactccctagccatatactcttaactaagctgaaggcaagcagggccttccctgggtactaatgatggcaccagcaggaagagagatggtgacaccagtttgcggggagtctttgaggttggaatttcaaagtaatgcaagtgagattaggaacgattgtcagagttgaggaatgattataatgcccagagaaacaagtactagtctaatggtgaacatggtgctcttccaggcaaatgctaattagaacagaacagcccgcgaatttccagcacatctgtcccctatgtgcacctccatggagactgtgatggggactggagactgagcaagtatccacccacttagagcctgcagcgggggcaggaagaaggaggagcttgggaatcctctgtgtgggccaaaccaggacacaggcagcttctccatttgtatctatgctgcttgttggtctttgtattttagatagttgaagattatctaaatgtttctttgagaaatgagatgtgtatttttttttttttttcctgagatggagtctcagtctgtcaccaggctggagtgcagtggcacgatctcggctcactgcaacctctgcctcccaggttcaagtgattctgctgcctctgcctcccgagtagctgggactacaggtgtgcgccaccacacccagctaatttttttgtatttttagtagagatggggtttcaccatgttggccaggatggtctcgatctcttgaccttgtgattcacccaccttggcctcccagagtgctgggattacaggcatgagccatcgtgcctggccaatgaggtggtttttaataacttcaattctacatttcttgttcagctgcctgacatgagggccaaggccaagcctcatgtggtattttctttctttggttgttttgttttttgagccagagtctcactctgtcacccaggttagagtgcagtggtgtgatcttggctcactgcaacctctgtctccttggttcaagccattcttctgcctcagcctcccgaatagctgggattgcaagcttataccaccacatgtagctaatttttgtatttttagtagagacagggttttaccatgttggccagcctggtctcgaactcctgacctcaagtgattcgtctgcctcggcctcccaaaatgctgggatctttcttaggtttttaaagatcatttcaaaaatataaaatataatagaatactaagcctctctctacccctaagccagcttcagtaactatcaactcatgaccactcttgatttttatgaagccctgctcactgccccctctgaagatgtgtgtgtgtgtgtgtgtgtgtgtgtgtgtgttttgagatggagttttgctcttgcccaggctggagtgcagtggcatgatcttggttcactgcaacctctgcctcctgggttcaagtgattctcctgcctcagcctcctgagtagctgggattataggcatctgccaccatgcccgggtaattttgtatttttagtagagatggggtttcaccatgttggccaggctggtctcgaactcctgacctcaagtggtccacctgcctcagcctctcaaagtgctgagattacatcgcgcccagccgcgtgtgtactttctaattgaagaaaccgtgttgtttgccctgcacggattcccagggtctagattgggctcattgcatatccctcctcccctcttgtgaccctctacatccttgcatgctgtatcatttaacatgtccatctggtaccagaagttagtagttagatctagaagcttgatgtgattcaggttttattttcccccctcctccctttggcaagagtactttgtaggtgagggtgtgtaccacctgccacttcgagatacctcgcttaggtctggttatgtgtgtgtggtatttggagccattcatgatcattgcttaagatgcattaatttgttaggagtttgcaaagtggtgatattccagttcctcatttattagctgaaatatttgcataaagagaaactttgccattatcaactctttgatactctgagttacagtacacctataggaaaggcaggagaaatgattaattttgttatttttttttaaaccgattttcaaaataatgagtgattctccagcattttcctgtggagttaatggattttttgttattgcttgttctgtatattttgatgagtatgattgtgagctcatggatttaaacagttctgatgtgctgttcattacagttatcatccctgtgccacgctttggctgtctttggctagtgggagtctatcgaagttgggccctgagtcttttgaatgtatactattagtctttgcaacttcctcattttctggtatgacagatgttttaggctccctgaacagtttttgccccagctgtggaatcaaccatttttcctagcagctttaactccttttatgtttatatttaaagataaacatatcatgaatttatgtgggtatttccaaatcagattcaggacaccagtgttttgacttaatctctttactcttacatctgtatctcttttctcccttcatctgttcttttttctccctagcctaatcccagctcttgatatcaacatacttattcatttattttatcttacagtatcaacactattacccataatatgatttctaaaaataatttaaattttttttttttgctgtttacattgtccttagggtagataataatgtgcagggactatcttttcaaactattttttttacagtcaaataaactagttaaactattttgtttaaagttaaaaaaacaaattatgattcatccttttgtttggtaggtacagtctttactgaacatttaattttccctgctgtgcagaatggaagatcttagtttcatcactgaaatctcagcatccttttttcctaagggattttcttggaagcctaacatttggcagcagttctgattaaaagccctttgtggtcttaaaagttcttcagggtcaggcacagtggctcacgcctgtaatcccagcactttgggaggccaaggcaggcagatcacgaggtcaggagttcgagaccagcctggacaatatggtgaaatcctgtctctactaaaaaaatacaaaaattagttggtcgtggtggcatgtgcctgtagtcccagctactcaggaggccaaggcaggagaattgcttgaatctgggaggtggaggttgcggtgagctgagattgcaccactgcactccagcctgcgcaacaagagtgaaactccatctcaaaaaagctcttcacagcgggtctccagcccctccagactcagacacagagagtgcaggagaggagaatagtgatgtgtacaggcattggtttctacactccagaatcttccggggatggggaactcaggccctaccctgatcaattggccctaaatgtgggggatgggtcctgagcatcagtgagcgtgtaagtctcctgggtgattctaacatgcagtcaggactgcactgattcagagaggacttcaggtatatctggagtcttaatggttattatttccccagattcaccttttttcttccttatctctggatctttctcaaccctagttttgtcccctgttcccccatttctttttttttttttttttttttctgagatggagtcttgtgctgttctccaggctggagtgcagtggcgcgatcttggctcactgcagccttacctcctgggttcaagtgattcttgtgcctcagcctccccagtagctgggattacaggtgcgagccaccatacccagctaatttttgtgtttttagtagagatggggtttcaccatgttggccaggctggtcttgacctcctgacctcaagtgatctgcccacctcggcctcccaaagtgctgggattacaggtgggagccaccgcgcctggctgtatttccccatttctaaaacaaactgcttactcatttttccacagctcactcttttctgcttgtatttttcactcaaacatcttctttggtagcttgtttctatttcctgtgttttctttccttcccatgcaatctggtatggtgcagttgggcaaggaatatctgaagtgcgtgggggagcaggagcatggaggccgcgtgcccgctgggcctagacatgtaatgtgtcactccaagaaagcaagggatggggctcgaatgtcaggaggctgagtaccaaatactccattgagaagtatctgccttcaagtactctgggactccagtagaacctgaagtatggaacattcaagtatcctactggactctcaaaaacctccatggtttcacagtcgaggagaattcttgtgaaggagtaaggactattcttagcttgtttgtggaaagactcttcaccaggtcatagattggttggtctctaaggtggagaatttatgtgagttacttttgaccttggtactgatatttagaaagtttaaatttggttagttgtaattttgataatgagtattttcccagttgtttcgtttcttattagttgaaggttaagatggagaggtccgtggaaaagcatggaccaaaaaccagcattactcaccgatgagcccatttgcttgactggattattaaatgctgtctctcggcagggaaatctggacaattaggtagtcgtgacctacctgccttttgcattctctttcgctgggtttattgcatctgttatttcctctgggggtcatccctcttgccgtttgaatcatactcacctacggctgaaatggagaagcgtgtaacaggtaacagtgactcccagggactgtgagaagtttcaggaacatttagaaaggcaaagagcactgagcatctggctgatagcccaggtgtgtctgctgcggccctggttgcccttggcactcctgagccagggctgcccatgtgtacagtttggccgtcttgcttcttgatgtaaacgtccagattttcatctcagtaaactctaaacagtccgtgttatgacccattgtactgggggctcttccataaactcttagtgccttttgaatgattggccatgctggaaatgtaatggtgagcctctgcattcttgatatctgatcatcttattcataattcttcaactaaatggtattttctgatttctgtatcataggggaaaacttccatgacctcatggaaggcagtgcagttggtgaagtgtgtgagagagagtgtgtgtgtgtgtgtcgcgcacgcgcgcgttcacatgccgagacaggcgtgttgggatttaatatcatgacccatctgagggatgggaatgtcttctgtaaatatcctgatcccgtgctagttgtttgggatgaaagtgtgtgttaattttgtttttgttttttactgattgttcttctctcacttcagatggacagaaaacagctatcaatggcaaacctgtcaggtgtttattatgtctttgttaagaaggagagattgcttaaaaggaaaagttgtttttcaaggttaaggtcttgaaagattttcaaacattttgcattttgtcttttgagaagtcaggaggaaatgatgtcgagggcctacatgtttacttttggtgacctggatttgcaatgagtgtttggttttctttgttgggggaaaagggtcccttacaacgggttcgagagggaggaagtaggttgccgggtgaagtgctcatttggcagggagggtaaaggaaagctcctttgcttacctcaaaccgtggctcaagctgcgttctgctgtttctttgcctttagtcttggaggttaaaattgcattccctacatcttgttcagaaggtaagcccgcatgcttcccagctcattggtgtgggattttaattttgccttggggaaaagatgattattaatattgcttcaaaaccaggaccttcaaaatatggctgataaagagagccactgatgacattccctttgagctcaatttctgctgtgtttaatttttgactccacactacctgagccaaagtggcagttcttctgggcacatccgggcttgtagggggcagaaacatactgaagcaatgtcctgtgggtccaagagcctggaatcctccaagtctggttcttttccccactccaactgaagctggacttggtggtgttagatctaccgactcttggagtttggattgggaaaaattggagagtttgattttctgatctgggtttgtgccaatatctccattcacaaaggctcttaactgtgaagaaggtggcaagagtgctggcctcccatagacgagcctgtgggctgggatgtcaagggtacagaggaagtggggtgagagctggggtgtctgtttgtaagcaaattccttactcctcttgggccatttttttccttattcaccttaggccaagacttaatttggtagtttgccaagtgtgctttaaagccctgtttgtaatacagagcacccacagtgtaccaagcacaatgtactaaaactttattgactttgaaattagaattttgatttcaggttaaaactcctatcggcttgtcttaaagaagaaaacagttctgcttttcttttagatgagtgatgaatgttgcactttgaaaatataaaacttgtgttaagaaaaaacgagcctaggtgccgtggctcacatctgtaatcctagcactttgggaggctgaggtgggaggatcacttgaggctaggagttcgggaccagcctgggcaacatagtgagaccctgtcttgaccaaaaaaaaaaaatttagctctacatgatggtgtgcacttgtagtcccagctacttgggaggctgaggtgtgaggattgcttgagttagggagttcgaggctgctgtgagctgggattgtgccactatactccagcatgggtgacagagcaagcaatatctgaaaaaagagaaagtaaaaagaaaaaatggtgtggtctgtatgtctaattaaaggcttttctttttcttcttttaggaaagtgccaaagtaatccagcccatatttttgggaaaaattattaattattttgaaaattatgatcccatggattctgtggctttgaacacagcgtacgcctatgccacggtgctgactttttgcacgctcattttggctatactgcatcacttatatttttatcacgttcagtgtgctgggatgaggttacgagtagccatgtgccatatgatttatcggaaggtaagtgacattcagcattaaacatgtacctcacctgaagcatcagaagcattctgaggaagttttatgtaaattaaatactgcataaatagccactgcactccagcctgggtgacagagcaagaccctgtctctaaaaaaagaaaaacgaagaaaacttctgtaaatagaatcatttacaccttactagagaagcttgctatttgcatcaggccaatgttttttttctttatgcaaaattttccagtgtataatgaaagttttctactgctgtcagggcatggctgcctttgataacaggctgttgcagaatactaaatttataatgaaatctaattaaaaatatcaaattggttttcagtgtttctttgcctcaatctcatagttgtatttatggaaatttttgttgttgttcattaaaaccttcacttacatcacagttgtattcagaagtgaacttcagtgaaattggatctatgaaattaaatctaggagaaaagaatatatttgagaaagggaattcttatattttttaaatgaaccatttagtcatattccatataattttcttaactgaagaaaaatgtaaatggaatccacgtcggatacaggctttctttatattctaaatctagttgtggttgtttttaatggtatttaagaaaatagttggatgtttgggataacactttgaattgttgattgtttttcacaattttggagagaacttatagtgtttctattttatgttggttttcattcaaagtaagtttttacattaaacagttgtcccttggtattcgtgggggattggttacaggacctcttgaggatacaaaaaaattggaggatgcttaagtccttgatataaagtggcatagtatttgtatataacttattcacaccctcccatatatggcattttatttatttatttattttaaataatttcatcttttattttagattcaggggtagaggtgcaagttttttccatgggtgtattgtgtgatgctgaggtttgggttatggatgatcccatcccccaggccatgagtgtggtacctgataggtagtttttcagcccttgccgcattccctctctcccaactctagtagtcttcagtgtctttgttctcatctttatgtccatctgtacccaatgattacctcccacttataagtgagaacatctggtatttggttttctgttcctgcgttaattcgcttaggataatggtctccagctgcatccacgtggctgcaaaggacatgattttttttttttttttatgggtgcactcccatgtactttaaatcatcttggtttacttataatacctaatacaatgtaaatatacattatataatgtacaatatacaatgtacattgtgtacagttatataatgtacattgtaaagtgtacattatttaattgcacattgtaaattgtacattatataattgtacattgtataatgtaaatatacattgtattaggtactataaacaaataactgtttagggaatagtgacaagaaaaaaatctgtgtgtgttcagtacagacacaatcacctattttgtttcccccaaatattttcaaccccaggttggttgagtccagggatgccaaacccatgcacaggaaaggctgactgtattttctttcccattagggcagtaataatgataagacctgatttgatattttcttattttatttgtgcttttgtattgagatatgccataaataataccatagtttgctgtggtcttaactgttatagaaggagtgggatttctggttgctttgctgagaagttgccatagagatgctagtgtcaagagctaaagaacttgtcattaaatcagtcctggatatctctttgtcctgggccgtttttttaagccatttaaatttttttttttttttgagatgaagtcttgctctgtcgcccaggctggagtgtagtggtgcaacctctgctcactgcaacctccacctcccgggttcaagcgattcttctgcctcagcctgccgagtagctgggattatggacatgggccaccacacccagctaatttttgtatttttagtagagacgtggtgtcaccatgttggccaggctggtcttgaactcctgaccttgtgatctgcccgtctcggcctcccaaagtgctgggattacaggtgggagccaccgcacccagcccatttaaatttaaagtattcttctttgacctcgttgtcacttatccagagtgtccgtaaggtgtcctccccaagtcttcctttgacatgggggaatcaatcttataattctgtgaatcctggaggcctcgtgtcttagtgtctatggtacagtataacaggtatgcccggattcctcatgtgtgacatgaaaatgataacaaggcttgtacacactagtcaaggggtcttcatcatcatcaccaccaccaccaccaccaccaccaccatcatcatcagcagcagcagcatcatcatcatctgtgttattctcctgtactctcttctaccatttaggagaagaatactcaggtttttctataaactagctagatttttgtctttcaagatcatacttctaataaattcataaaaattttcactaacactccacttggcaaactttaaaaacaccctacatgaagtccggtttgaggtagtggttcagtaaaacacagctctttgtacaagtgagatactgttcacctgtttttcttcctcttttccactaacgctttggaaaatagcctttgggaaatctgatctaactcggcagacttgcttgcctgcatgtaaacatctcccaaaggtattaatttgtcagcttgattatcttagaagtattgtctctttatgaagtcaaaaattgcttgggttaaaccataagacttaacctgaaatcccagaaacgtgggaaagacgaatatcctcatgtcctgccttgtatgtggaaacatgcccaggtgaagaaataagacacttcctcctcacacgtgggctgcttccttggggcagaggctggctctgcagcaggactctgaaaggtccctctgcgacactggcagtttccactgaggcccccatatcctgattcccggtctggcagaaatcaggttggctgttgcaaatggaatgactgccgagcccgtcgtcgacatttggtattgaatgatcttgcaggatgtctgaaaatgactcgtcatttatttactttttcacagctttggtaaaattactttaggcttttcatcattaatttttcttcttattgtaataaaatatgcataacataaaatttaccattttaactctttttaagtgtacagtagtagttcgtttgcattaagtacattcacatcattgtgcctcccaaccccaccatccatcgacagaatttgttcatcttcccaggtggaaactctgtacccattaggcactggtgtccactctcccctctccacagttgtcagccttctgctttccagctctatgaatttgatgactctaggtatttcatagaagtagaatcatacagtatttgttattttctgtctggctcacttcatgtagcataaggtcttcagggattatctgtgttgtattgtatgccagattttaattcctttgaaagagtgaataatattccactatttggatatgcctcattttgtttatccattcatctgccaccggacatttgggttatttctgccttttagctattgtgaacaatgctgctatgaacacgaatgtacaattatctctttgagtccttgcatttagttttcatttatttttatttttgagatggagtcttgctctgtcacccagtcaggagtgcagtggcatgatctcagctcactacaacctctgcctcctgggttcaagtgattctcctgcctcagcctcctgagtagctgggactacaggcacctgccaccacgccaggctaatttttgtatttttaatagagacagggtttcaccatgttggccagactgatctcaaactactgacctcgcgatctgctcaccttggcctcccaaagtgctgggattacaggcgtgagccactgtacccggccgagtccttgcttttaatacttttgagtatatatttatttagagatggagttgctgggttatgtggtaattctgtttaattttttgaggaaccatcatactgtttttcacagtggccacaccattttacattcccacttattctttaataatttgtctgtttaacttgagaactaaatgagatgtttttatgaatcatgactagctttaatttggattgatggctccaagggtggtctgttgaaatggttcatggtggtttgttcaggttcctcggaactctgtgttatttcttacaacttttaccaaataaaaagactgtgcagcacaggctgtattttaagtgaggtcaacagattggcattaagaatatgggctcctcatggcaatagtgtgctgaacattgtacttgctcatgttagaatgtcgtcagtcacaagtcatattcccagcatgggttcgtataacctctgcagtggggacagtgccttatctcctgtttttactttttagctatctgggacacagaagcaggggatgtgtccatcttcaagtctcaaggggttacttctatagcttagagcacatgagttggggagttggctccatgttggaggaagagggtccctttagtcaaactgagcctggattaaggatagctgaagatcttcagccccagccaccagtgagactggatctcccatttgcccttgcctaccttgacttagggccaggatagatctgagcctgaatgctaaacatctgaatgctagacctacgatggaatggaggacagtttcattaatcaggatgggcttgtcatcccagcttttgtattatcaaatacattaggcatagagacttttccttaagatctgtggcctaattagctcaagatttcttgactttgtatctaatttgaagaaccgtggtggttcctgcagtgggttggcttctgagttgtggattttgatgttgggttggcttgtcctgaatgccaggtaaagctatagcagtacctgagcctgcttgctggtgctcctctctgctgtttgcagacttttttgcagaattgagaaagtttggggaaactttttattctggataaaactgctcgtcttcactttctttagagttactctgaaggatagtttgaggtaaagtatctgtctgtccttcatcttccaccttctaaggtgtgttgagtccctgcagactttctagttttcctttatcatttattacagatctgccctagaagaatatatggaatatatgtatgtagtgtatctcagaggggtgctctctatagatttctgtgttgagaaatatttgtagttaccctaagtgtattgtttaaccatttatgtgatactgtgtggttctctttttagaattctgtaacttggggggaaatgcatattccctgtatgcagggaatatggatactccaggaatacatgtatatattctcttggatgctccatccagagttcatattatcaggtactcttcatctttctgggggaagaattcctgtttcttttaatcttttcatttgagaaccctctcctcttgaccatttcctttttttttctttaaagagacagggtctccctatgttgcccaggctggtctcgaactcctgggctcaagggatcctcctgccttggcctcccaaagtaccaggattacaggtgtgagccaccactcctggcttttttttttttttcaagacagagtcttgctctgtcgcccaggctagagcacagtggcatgatcttagttcactgcaacctccgcctcccgggttcaagtgattcccatgcctcagcttcccaagtagctgggattacaggcatggtggtgcatttttgtatttttagtagagacggcatttcaccatgttggccaggctggtcgcgaactccaaacctcaggtaatgcgcctacattgacctctcaaagtgctgggattacaggtgtgagccactgcgcctggccttgatcttttccttctcttttcttggcattgctgcagggcaggtatatttttaggtcagtggtcagagcagcagacagcctcctctaccacagactgagtaggaagtggaaggtgccctcccataatgcacagagaggctgggcttgtgcacccttcccaagtcatgtctgccgccctatgcaataagtagaacctgaagtaaaaaaaataaatgcaccgtcatgcgctgatggtgagaagattgcagccacctgtagctctctggctgcatcccagtcttcccaccccgtctccctctgggttttctcagtggatgtggacagacaattgatagcaaattttgtcagcaactgagccatacagtgttgtggtcttagttttaaaacagaacttttgtttttatttaaagctatttttatttcactgtagactgtatattgctttatatttagactgaatagtatgaaattacagatattcagggccgggtgcagtggctcacacctgtaatcccaacactatgggaggccaaggtgggtggatcacttgaggccaggagttcgagaccagcctgaccaacatggtgaaaccccatctctactaaaaatacaaaaattagcctggcatggtggtgcacgcctgtgatcccatctacttgggaggctgaggcacaagaattgcttgaacccaggaggtggaggttgcagtgagctgagatccgtgccaccgcactccagcgtgggtgacagaacaagactcttctttaaaaaaaagaaattacatatattcaactcctttgggcctttttacaaaactagcaatttcatatggctcaaactaatcttttgtctattagtctgtagatcggtttcctttctgaagattcgtagagagcctcttgacaatgttgtcaaagtgaaactgtgtggtgtgtgtggaagttatctccctggacacatgtgatactttggttggacttcctcttctaatgttattttctaagtttctgacaaaattagaatgacccagtagtgcttcttacattgtccataatacgttaaaatttttgtttcaaaaacttttctcccccacagtttttggttttacttctgatgtgaacttgaattgtacctgggcattttgtgagacattaatctcatcaagggacaatttgtcagtcttctagtttgctagggaatagcttaagaggagccaagttaactttccatagcttggagtttgagctaagaaagcaagttaaggagggaggacttgttttgtttggatttttccaagaggaaatttctgctgctggagatttaggagtgtcagatgcgtcccatcatctgataattgtatttgcttcactggggtgtgggtgcaaactggaagaaaatgctttagctcagtggttcctcaaactgctctctgttgtattcatgaggggaaatctttaaaataccactggtgtctggactcttcccctaaacattctgatttaattgctttagggaaattttaaaagctcctatgtgatactaataggcctcaaatatgtgttcagcttaattttatgctttataactaagaccttccagttcacagagatagcatatgggttgcgggtttaatccccctcattggtgaataactccttcggacttgtaggtataaacctcaagcatggtagctgttcatcagcccgagtgtcctaccatctggtctgggaatctcatatgcaggagagcccgggtgttgagtcaggtgtccaggcactttgtagaagactccatgaagtcctctagtggcagattggcaagggtagagattgagtgtggactctgagagcaatcatggactcagagcagtcagacctgagttcacatctcagtgctgtcattttctaagctgtaaaatcttaagagaagcacattcgcttcccagggccagtttcctgataacaacttgttgaagactactctttccccattgaattaagttggagaaaatgtagattagatggccatttatgtgtgaatctttttctggatcctctattctgttttgttgatctatattttctttgttttactttagtagtcagatggatagaatctattctttcttcatagcaaattatcttaattactatagctttataaatcaaatagtgaaagttacccaacctgtttttcttttatgattgttttgactattctaagtctcttgcattttcatattgactttagaatcagcttttcaagttttacaggaaactgttgggttatgcatcttgaattctaagacatggtcttagaattccagatgaagtaattccagatgaagtaattgccctgttggagaagtaattctccaacagggcaattctatccacctgactattaatgttaagagtgggcatcttaacattatttagatttccagtctaagaaaatagtgtatttacctattcctcagttatctacatctttataaatttctttttctttttttttttttttttaagtggagatggagtctcagtatgttgcccaggatgatcttcctgagctcaattgattctcctgtttcagcctgccaaagtgttgggattacaggcatgagccactcacgccaagcactagatctttaactctccttgtaattattaggatagaggtcttaaagatcatttgttatatttttatattttatatttttatatttttatatttgttagcatttaaaaaagaatgccataattcaaagtagcatttgtgctgttataaatggtattttatttatttattttatttattttttgagacagactctcgctctgttgcccaagctggagtgcaatggcacgatcttggctcactgcaacctccgcctcctgggctcaagcaattaccctgcctcagcctcctgagtagctgggattacagatgcatgccactgcacccgactaatttttgtatttttagtagagacgggattttaccatgttggccaggcaggtctcgaactcctgacctcaggtgatccacccaccttggcctcccaaagtgctgggattacaggagtgagccactgtgcccggccataaatcgtattttaaattttcacttaccgtttgttgttagtatatagaaatacaattgatttttgtatttttgctttgtttcctgaaaccttgctaaagtgcgttaagttgcagtaatttttggctgattccttaggatagctatttagataatcatgcctttggataaaaacaaatatactctgtgtgtgtgtgtgtgtgtgtgtgtgtgtgtgtgtgtgtgtgtgtgagagagagacagacagacagacagacagtgggggagagggagagaagaagggagagaagttaaaatctccggttatgagagttagtctctttttctccttagtcatgaactttttgcatcctgacttactggattcacttgtatttaaagtttcttactggattcatttgtgcttaaggtttatttgtatttaatatcccctcatcttcaccgccatacaatatttatgctttaattattcagttgtctttccacaatttaaaagaagaaaaaaatagtttttaaattacccactgaattactatttctggtgctcttcattccttccctttagctccaggtttccatttgatataattttttttcagcatgtaaaacatctattagcatttctttattttctttttttttttgagacagagtctcactctgtcacccagactggagtgcagtggcacaatctcggctcactgcaacctccgcctcccgggttcaagtgattctcctgtctcagcctcccgagtagctgggattataggcatgtgacaccacacctggctaaattttgtatttttggtagagatggggttttgctatgttacccaggctggtcttgaactcctgacctcaagtgatctgcctgccttggcctcccaaagtgctgggattacaggcgtgagccaccacgcctggccaacatttcttatagtagaagtctgctggccatgaattctctcattttgttctttaatctgaacaaatttttttttttcttttgaagcacatggttgctggatgttgaattctgggtgatagctggtggtgtctgcccctctcccttcaaaggtgttccattgtcaactggccttcattctttctaataagttgttagccatcatttgtatctttattaccttgtttgtaatgtttctctttttttttttttgggttgatttttttttctctttgatactgattttttagaggattgataatgatcctaggtataatttacttggtatttatacttctcggagtttgctgagcttcttggatctttgatttgattctttttattattgtaaagtttaggaaatatttaaccattatatcttaagttttttttgacttattctcacactcttgtttttcttggactcctattacatatatattaaactatttgagattgtcttataggacagtcagtctttttcacttttattcaatcttctctgttgcttttaaactgctgataagaccagccagtgatttttcttttctcctttatttctcatttcagtattgcagctctagagtgtttattgggctctttttaaaaatactttacactggccaggcacggtggcatgtaatcccaacactttgggaggccaaggcgggcagatcacatgaagtcaggagtttgagactagcctggccaacatggtgaaaccctatctctactaaaaatacaaaatttagctgggtgtggtggcggacgcctgtaatcccagttactcaggaggctgaggcaggagaatcgcttgaacccgggaggcagaggttgcagtgagctgagatcacaccactgtactccagcctgggtgagagtgagactctttctcaaaaaacaaacaaacaaacaaaaaactttacacttttttgctgaaaatctctatctctttactcatatttttcctcagtttctttgaacatactaacccattgagtacatttatacttgtttctgtaaatcttaaaatccaatgtgtgtgcctacttggatttgcttttattatttatatatttgaggggtttggtttttattatgaagactgctttctttattgccctgagttaaattttctttcttgcatgtctaagattttttattgtggacattttggatgatacattgtatgtctgacttctgataattctaaaaagtattgaattttactccaataccatattaactggctgaactcataggcctgttttttatgctttgttagggcagaactttggaaattttcaggtgttttccaagcttctctaacttgatgggactcaagattcaaaacatgtgtcatttgcaggccctgttaggtagtgcttgttttttcttgggcaagtttagagttaactcttttttagtgctcaacctgggtagcacttgacatttagggctaaataatttctttttggggatggagaggctgctccgtgcattgtaagatgttgaacagcatctgtggcctctgcccactagataccgaaagcgtccctctagttgtaacaaccagtagtgcctccagtcgttgccacatctctcctgggaggcaaaattgccctgtttgagaattatttctctggatagtgctcttgaattctaagacatgatctctctggtgtttcaaccgtatgccaggtgtgttaatgatatatgaatgaggtttccgcactctggtctggtgagaatttcagtacctcacctcagcttgaccttcagtatctctattcagctcactcctcctcagcaccagctctctgttaaggcttgggcggccttgacctgtgcccgcgcatcagccaaggacttgtagcacccccaccccacagccttctggggcccttcccttctgatacctgcttactgtccagggccatgcagatgccagtggctttaactaacccaagctctggcctccacccctttgctcagcagggctgctgtgatgtgtttggacttcagctcactgccacagtcggaaagtggtgtcctagctcagagccaaggcaatgcttggtgtctggagacatctgccttctagtgttgtacagttctgaggcagaggagtgggccgttatggtatgagccacttagccgtggccagagcccagtctctctgctagttgaatagcccagatgtttatgagctgtggagctgggagctccaagtgtacagtatagggtgtggttgtgtgagctgtaggacatgcctgtttaacttccttactgaatagatggagggtgagggcatatgcaagactgaggggctccagcatctgccatatgtcacctgtgtgcttaacaaaaaccccaatcctggggccatctcagacctgacctgctgtttcagaatttctagagaaagggcctggaaatctgtatatttaatttgtgcctcagggaagtttctgtactagaggatggcgaagggaacaacaggtgtggagagggaggctggacgtggcttccttgaaagggaaagggccgcatgaggctctgcattcctttccccaggacttatattgaaatcatggccaatgatttatttattttttaaaaatattaattcagtttttaaattttagttttttttctgttttttccttttttctatcttctaagacatcctgttatagcaaatttttacattttttcattgccctgccctgaaaatgtttttatttctcgttttttttttaacatatttctctaggtttagaatttgtattttgtgcttatttactgtcaggccttcaaacataattgatttgtttttaatctttttctactaaaaattaaaaaaaattgtggtaaaatatacataacggtcaggcatggtggcttacacctgtaatcccaatactttgggaggctcagatggctggatcgcttgagccttggagttcaagaccagcctgggcaacatagtgaaaccctgtttctacaaaaaatacaaaaatcagccaggcatgatggtgtgtaccagtagtctcagctacttgggaggctgaggtgggaggattacctgagctcaggaagttgaggcttcagtgagccatgattgtgccactgtacgccatcctgggcactggagtgagaccctgtctcaaaaaaatatctgtcacataaaatttgtaatttttgcaaggcatggtggctcttgcctgtcatcctctggtgtcctccattttactttctgtctgtaataatctgattactgaagggacctcatccaagtgggatcataccatatttatccttttgtgagtggcttatctcacttcgcatcatgtcctcaggtaaatttaattttggggtttatgtcatacattttctcagcatttagtgaaaaacttctgcctcaccctgatcctcaactgtggtgctgaacctttatttagctgtagtggaagaggaaagaatttctgagattctacccttttctggcttcttgctctgagcaactgcctgtgtcctgatgtgttttgaagtcctcatcttctcctttctactccctctgggacccattagctgaaggaacagggtcattttctcttttggatctctcctgggggtaatagctgtgggcacagggctgttatttgatatgcttatcatagagtcgagaaagtgggaaggaggtaccttggtaaagagtgtctgtccctcctctctctgtgcatttttctcctaattcctttatcctcatcagtgaaagagatgaaggcattactgcatttggtatgtttggttgtaaaaatgtatgttagtgaataagtcattagtaagacattttctgacatctgtcatttttttttcctgctgcacaaatctcttcattttcttaaagcttcaaagataatcttgaaatgggaatgaatgatggaatgaattttgcagtattacagtactgtgtactgttactttcggattactgaatatctggcctactcaaggtcaatactttgataaatacacaacattaggaaaaaaggaaaatcacgtatgtaaaatattttcattttgactgattcttagtaaaattttggtgagtctgtagagtgaagattgcttcctccaagtattcttagtctgaaagacggcacatgaaacatgtcatatttgagaagatacattataaacacatttcttatttgtttcttattcttttagaagcagaaagcaggctgggcgcgttggttcacacctataatcccagtactttgcaaggccaaggcaggtggatcacttgaggtcaggatttcgagaccagcctgatcaacatggtgaaaccccgtctctactaaaactaaaaaaaaaaaaaaattagccaggcatgatggcgcatgcctgtaatcccagctacttgggaggctaaggtaggtgaatctcttgaatctgggaggtggaggttgcagtgagccaagatcatgccattgcactccagcctgggcaacaagagtgaaactgtctcggggggaaaaaaaaaagcagaaagaagaaaaacatgataaaaaagatttttaaaaaatgatgatggatgccaaacacacctctaatcctagaactttgagaagccaaggcgggagcattgcttgagcctaggagttcaagaccagcttggacaacatagggagattctgtctctgccttggccctccctgttctaccctccaaaaaagccaagtgtggtggcacatgcctatagtctcttacttgggaggctgagacaggaggattgcttggaccccagaggtggaagctgcagtgagctgcgatcatgccacttaactccagcaaaaagagcaagaccctgtcacacacacacaacaaaaagatgacagaagtttggtttttttcttcctcttcaatgggggtatactgcatttatattctccttaagatgatcttctctgacctaaccctagaccatgtatttgtccccatgtatgtcctcactatcccttctttacccactccctggcttgtcaccctctccatattttcctttttcttcctgttgccctgccagtatgtcttgctcatctctgttcccctctcagtcgataaaccagttcagttggggcttgtttttcaggcaaagaaactggtgatagcagggtctggggctgaggggtctttcagccatggtggggggatgtggcccccctttgaacagattactctcaaactgtgttacatgttctttccatgggtattggtagaattgactaattagattgtactaatttccttcaatgtatattgactgccccaccactcattgaaacgctaatggttttttttccctttcttttcttttccttccttcctttctttctcactctctctttttttctttctttctttctttctttctttctttctttctttctttctttctttctctctctctttctctctcatctctctttctctctctctcatctgtctgtctcttttcttttcttttctttttttttcttttctttcttggttttgctctgttgcccaaactggattccagtgggatgattactgcttactgcagccttgagctcctgggctcaagcgatctttccacctcagcctcctgagtagctgggactacaggcatgtgccaccatgcctggttaatttttaaatttttttgtagacaggatctcactatgttgcccagtctagtcttgaactcctgggctcatgtgatcttgccgccttggtcttctaaagtgctgggattacaggcatgagccacccctacctggcctacggagaactttctgtataggttttcaggcttgtattccagccatgaaaaatcaggtgaaacacaaacaaaagcctcagaaggcagtgaaactgtcagattataaagaacatacaggttgttgattttggatggacattttcatctccttaaatttcatttcttttacagaattagagaaggaatgtgactttggtagtcacccatcatgtttacgaggaaggaggatattagccagtccttggatcatcccctcagaaacagagattattggttttagattgtgcagtcattaaagtagatatgttgttactaagcaactctggccaacagtattggaaaaatacaggcaattttctgcttcaagtgattaaacatactcatcctagttgcctgttgcagaaatacccagtttaattggaagtttcattacctcacaaactcaactctggggtagggtcatgaaccaggaagtaagcaaaacataaaataaataagatagataatacttactttatatgcttattcagaacgtttttactctgactttacttacagcactcaaaagccacatcctagtctaaaacactagtaggtaatggtgtgacattctgatgagaataaagagatacctgatagcctgacagccaggggcaagatggatcaggaagtacccgaatccgaaaagtgtggccatttggggactctgtgagaggagcatccctgtccaccccgggtcattgacactgggtaagagccatattgttgtgaggaatttgcatcgtgaaggtgatgaactgcggtttgcatcttttgttttatttatttatttttttaatttttgagaaggagtctcactgtcaccctggctggagtggcgcaatcttggctcactgcaacccctgcctctcgggttcaagcgattctcctgcctcagcctccccagtagctgggattgcaggggtgtgcgccaccatgcccagctaatttttgtatttttagtagagacggggtttcaccatgttggccaggctggtctcgaactcctgatctaaggtgatccgccctccctggcctcccaaagtgctaggattacaggcatgagccaccgtgcccagccgcatcttctgttttaaaaggactattagagaggggggaaagacatctgttaaaatgaagattggattaatgcatttaatccaaaaagggatattcatctcaccagtctggaaaactcagttccatgaaaaggtcattctctccttccacctccctttgatggtgatatttatgtggccacactgattaaaataatcaagaaagaagaaacagtttatatttttcaaatgaagctagatattacatgatttatttttaagaaattgaatacaattaatgttttgttctagatagtacagttttcttgtaatctcaaatgtatttccttgcctgccttcagtagtaagcagctatcaaatggtgccctgctctgatggtgtttacttccaccattcacagtattgttcttaatggcatgcggattctagagtaaccaataattagatactcagatgttttccagtttttagtaattagatagttagatgtcttctagtttttgtatattacaaatagcattttaatggacatgattaaagctaaacatttggacagatccttcatttcctagggcgtacaaatttcaaggcttttgctatgctagattgatttcctccccaagagttgttaattacttacattttccccggtgaaatgagagagctccctacaagtccagatttgatgttatattttaataatcactgtcaatctcaccaattttcataggtgaaaaataatgcattgttgttttaatttacatggctttgtgtaatagtggatttcagcatttgcatttccttggccatttgtgctgggttttttttttttttttttttttttgtgaatttcctgcacacattctttgctccttttaaaaaataattggtaggcatttataattcatatcgatatgtaggggccgttgatttattaaagatattttgggtctgggatgtgtactacaggttttgatttcagtttgttttagttgccttttatttgttctcatggtagaactattttgttttcacagggaaaacaaatttaatctaatggtgtccttttataacctgtcaggttaatgaagcatagaatcaaaatatttgcagaacgatgatacattaatttacagattttttctgtacattggatgtgaactcttttaaactataacatggacactttattggaaccaaactttagttttctacattaatgagaaacactggtaactttgcttcattgaaaaaataattgcttgttctctgtcagatgtaagtagtttgagtttatttttatcttctcatctacaaaataggaataattcttacttcatagttgttttcttgttcagttgtctggcttacagtaggtgcttactaaatggtagcttgatttatgatcataatgacataaatgaatatgacttggtctatatattctggtagctgctgagggtaacacagatatatgattacactaattgtacttctgaggatgtgagcagtgttttgttgttgttgtttgtttgtttctttggtgttgattttaggtagaactttgattatcaattttatgccttctttttaaatgcaaagtccttaaagccaaaagtttactctaagacttgctttagctataactcgcaaattattatcatttactttaaaatatttcagatttcccttatgatgtcatctttgacacatgcttatttagaaatattgttaatattcagatattttgagttgttagagatgtcttattgttgatctgtaatttaattctgctgtcaccagaatacattctgtgtaacatttttatgttcagatattgattgaaatttactgacggcccaacataaggactattttaccttaaaagttagaagtatgcaacagtaaaattctattaccttccccatcttgtgtgctattgtcgtatattttacttctgtctccaaaatgcaccattaccatttttgctctaagcagctagttgtttttcaaagtaatttgtcttctttttatttattttttatttttttttagacaaggcctcactttgtcaccccggctggagtggagtggtgtgatcttggctcactgcaacctccgcctcgtgggttcaagcgattctcccacgtcagcccccgagtagctgggtctacaagtgtgtggcaccatgcctggagaattgttatattttttgtggagcccaggctggtcgcgaactcctgagctcaagcaatttgactgcctcagcctcccaaaatgttgggataacaggcatgagctatcatgcccagcctgtccttatatttactcacattggtcattttggtttctctttattctttctgtagatctgagtttccatttgataccatctccttatagcttgaaaagtattctttacgctgttttttacagttcaggttcattgctgataaagtctctcagcctttttctgaaaatgtcctaatttcaccctcatattttaaaggacattttgtgttggtgatagaattcagagttgacaggtgttttttttttttttttttgaattggagtctcacctatcacccaggctggagtggagtggcgcgatctcggctcactgcaacctctgcctcccaggttcaagtgattttcctgcctgagcctccggagtggctggaattacaggtgcccaccactgtgcccggctaatttttgtatttttagtagaggcggggtctcaccatgttggccaggctggtctcgaagtcctgggctcgagtgatctgcccgcctcaaccacccaaagtgctgggaatacaggcatgagccaccgcacctggccagttatttttgtctgtctttcagcactgtaaatattgttctgttgtcttcttgttttcattgtttctggtgtgtcagctgctgcttgtttttgttgtttctctgtgtttaatgtgtgtctaggtatagatctctttgtttttgtccttcattgaacttgctaagattcttcattatgtaaattaatatttgctaccaactttggtaaaattccagtcattatttgttcaaatattttttcttcccctatttcttcttcttttaggactccaattacatgaatattttattgcttaatattcttccataaggaccttcattcagtctttgttctttttcttaactctttttttctgtttgttcttcagatttcagttgtaaactatagaaggaagggttagcgactctgggaataaatcaatggaaagtatctgctattaatgatatctaatttatttttcatttcaggtattaccttttcagtttgagaagttctatttggttctttttgatattacctatctcgctcctaaactcacatctacttgttataaccatatttttctttaactccttgacatattataataggtgcttcatagttgttgtttactaattccaaaatctggatcatttcagggtctatttctgttgccatttccctcctttgattacaggtcacattttattgtttccttgtgtatctagtaattgttttactatgttgaacattatgatcgatatactatagggagtctggattaaagagcattgagttttgttcatgcaggtagttaaattcctggcagattggcccctttagcattgaatccttctgtctgtctgtcaatcagttaatcatagggcaggtagctccattctgaacttattccaagtgcacagctgttaatctagggtgagatctttattactaagacatagccttcctggtgtctcaggtgaatgcctgaggccccagtggagatttccttcctctcctcgggcggcatctcctactgcatgacctccagaatcttcggtcagcactcagccccatagctgctgctttcctaggcctcatggagtctggccctgcttatgaagccgttggcaaagtaccctgggtaaatccctactgaaacttctggggcaaaccctctgctactcaggctcacaaattccagatgcttctacaacttggaacaaccatctcttcctccaccgctcagtgaaactgttttgcttgggcagaaaatgtcctcaggcataaagccaggtcagtcccgggccaccacctacatttcccgtctcttgaggctcacagcctgtgttacctgtggtccagtgcctgaaaacagctgtgtcatatgttttgcccaacgttacagttttccaggggagggcaagtcctctctcatggttggaagcagaagcctggtagtttgcttgtcagctgtgtcttcctctttttttttttttaagatggaatcttgctcagtcgccgaagctggagtgtaatggcacgatcttggctcactgcagcctctgcctcctgggttcaagtgattctcctgcctcagcctcctgagtagctgggattacaggcacctgccatcatgcctggctaatttttgtatttttgtagagacagggattcaccatgttgaccaggctggtctcgaactcccgacctcaggtgatctgcctgcctcagcctcccaaagtgctgggattacaggtgtgagccaccgcacctggcatgtcttcctcattaataatattcatggcccttcatgattttttttatcctatctggagtatgactgatttaatttcagcaggcccttaatttctgtgttgactgtagagttatcgttcacttgggttaacttctattacaacccgagtatctgcccagccttttattccacctctacacctggtcacagtaatacacgacttacaagtagccctcctggtgcacccagaagaactttgtctttttcacaaattggcatctgtgctgtcttacctaaatcctcattgttggcctcagacacaatctgtggatgatagttcaagttgggcacaattgacttcagatttcttgaaaagggtcagcttaggcttagagtttggtgttgacattttgcttttatttttttaaaattaggtatcaaatttacatgctttaaaaatgtggtattttctgcatgtgggattaacattttgtatgtaagactggctttataaatatttacagatagtttgtagtcaataaggcacattacgttctgtttctttcctacaggggcgggctggtctctctccttccctttcttctccctcactcctacattttcttctttctttgtattttacgattgattcacttatatttgcataatagcattttttaatttttttttttttgagacagtctcactctgtcacccagactggagtacagtggtgcaatcttggctgattgcaacccctgcctcccggttcaagtgattttctgcctcagcctcccgagtagctgggattacaggtgcacaccaccacaccaagctaatttttgtatttttagtagagacagggtttcaccatgttggccaggctgatctcgaactcctgacctcaagtgatctgccttcagccccactaagtgctgggattacaggtgtgagccaccgcgcccggccattttttaacttttcaaaatgttttcacttctatctggccctttttttcccattcacatagccctcgttgacagtcttgttgccttttgcctggactgttattccagcggcaactcattctcctccttccagtagtctcctggccaattgcttctactgtttaaccttccttaagttgagtttctccctctaacttgaaaaaccacacgtactgttccatattgccttccataagcttcacctgcttcagccctgcttccatgagcttcacctgcttcagccccatttccataagcttcacctgtttcagccccgcttccatgagcttcacctgcttcagccaggtttggggtgttctttattcagcagcccccacatcctccttctccgtacttctgtcctagctaggcctcccctgcagtgcccttcccttccctccataaagtccctccttcatcgtccagggtctctcccacccagtgtccctcagttcgaactgtccccagttctctgtgcaggtcacagttgaatcacaggtgtctggacatacctagccctgtctcccaaggcaggaaaacatgactgtgtcactgtatctgctggggctcctggtgtcctccagatagttgatactccatatttgtcatttcccattgaacacattgaaaccctgtgatccaggcagggtgaagagactaaggccccatgtgtttaataatgttgcacagagaattagtgattggtacggatttatagtccacgtcctctcattttgttcctctgacagcctctctgttcttccctaatttggctcaaaattactttggttggctcttaagtagaaacttatgtccttttgtacttgggggcgtgtccaaattcattaaatgaggtgggagatttttcttcttcctacctctcgctttgctgtcctgacacagctgccaccactaaaggtgctggtggggcagagagagggggcagtgggggggtggggatgcttgtgcttagatctggtcttgacatcacacgagacttcctcaggtctgctgtgtcctaagcctgacttagtatcactgcatgaatacaattctctacttacctcttttatttcaggcacttcgtcttagtaacatggccatggggaagacaaccacaggccagatagtcaatctgctgtccaatgatgtgaacaagtttgatcaggtaagctgcagctcagggatcctttttcattgcattaaacacccctctttccccttttattctttctggaggcaggggctcactctgttcacactggattgcagtggcaggatcatagctcgctgaaggcttgaactcctgggctcaagtgatgtgcgatcctcctgtctcagcctcctgattagctgtgactacaggtgtgcatcaccgtgaacagctaatttctttttttttgaattttcatgtcagatgggctattgtggaaacatcataacaaaattcaagggtggcacatctcacacaagtgcgtgaacacccgattatcatgctcatgaactacaaaaggattgctggctaatttctttttttattatttgtagagaagggatcacgccttgttgcgcaggctggtctcaagattctggcctcaagcgattctcgctaccttggcctcccaaagtgctgggattacaggtgtgaacaccatacccgcccagtatccattgtttaatacttaccttgtagcggtatcatttatccagggcattctagctgctggccatattcattttgcactaggaccacttcttttttccaattattcattcatcagaatgaactaaagcctccgctcagtgtcagggacaatgaataagacttggtttctgttctgaagaagctcactgcctgtctgggagacaaacacacaagtaaattactggagtatgtggtgggcactgtagtacaggttttcttggggtactggggagccccagggcatatgggagctgaattctgtggcagagagttctggaaaatgctcagctcatcagtgaagatagtcacgatcaagacattcttctaatgccgctggtcggattctcttgcgagtctcccagacccactctttgtttccccagaatggcttcacctgtggtgggtgcttggctttctgctttagcaggtgtaaacccactgtggccatttctgtttaggatcttgcctgttcttttccagtggatcgtttctgtactgtgttcttactggttttgcttttctggagtcctaagaacgctctgtctttttctttaaaggtgacagtgttcttacacttcctgtgggcaggaccactgcaggcgattgcagtgactgccctactctggatggagataggaatatcgtgccttgctgggatggcagttctaatcattctcctgcccttgcaaagctgttttgggaagttgttctcatcactgaggtaagagaaatactgctgtgaaaaatgtcatatgtatttggtaacatccacagtcttcccaatgcttttgttcagaaacaaactaaatgccttttattatctcttccttgcatatgttgcagctcttcaggctcagccaagggggcctctgtccttatgctgaaggcaaatcttcaagggagaaaggtgaaggcattcactggctcctcccagccagcttttcaggcgctgtggcctcaataagtagagtgtccttaagcagaaatcacatatgtagaagttagttaaacatataatgaataatgataaattgaaatgtttcataggctccattctagctgcatacatctttaccgtgcttgtgttagagctgttttcacgtgtatatatgtgtgttatttttaattcagtatttccattaaattgtaagctccccaaaggcaaggtgaattttaatgatgtagttataaaatcacacagtcctagtagcatatgtgttaggaatatggttgttagctggtcgtggtggctgaagcctgtaatcccaacactttgggaggccaaggcaggtggatcacttgaggccaggagtttgagacctgcctggccaacatgacaaaactccgtctctactaaatttaaaaaattagctgggcatggtggtacacgcctgtaatcccagctacttgggaggctcaggcacgagaatcacttgaatccaggaggcagaggttgcagtgagccgatattatgccactgcactccagcctgggtgacagagtgagactctgtctcaaaaaaaaaaaaaaaaaaaaaaaaaaaaagaaatacagcttttgatcaagagattaatgatgataaaataaattagacttgaagcaggttccaacgaattggaaatggttcattgtcaaggttgtcagctggatcgagatgagccactgttggaagtgcattgagttctttgttttatgcttttgcttatggtgtattttctacttggaccttcccctctttgccatctggagaaatagtccttgtcctttgaggccccgttcaaatgctcctggtcctctgaagcttttttttttttttttgctctcctctttcccggtggagttaacaaacagccctttcttttctgctccccagcacttcattcccattttagcactctctgaccactgtgttatcgtcaggctcgggtgcctttctgcctttcctgcccacctgtgagctcctcgaggggacagatgacatctgactcattttcatgtcttcctcagcagatattacaaattctccaaaatacttgttgagttggtatagattgttgacttcctaatcgaagtctttttctatttgtattttgagtaggacctgtctgtgttgtcggaagcaaaagcgctgtagggaaccatgtgatgcaggtccctgcctgtgcctgccgctgataagggcaggctgtgatcgctcaggctcatctcccgtgtctggttccccttaggagtaaaactgcaactttcacggatgccaggatcaggaccatgaatgaagttataactggtataaggataataaaaatgtacgcctgggaaaagtcattttcaaatcttattaccaatttgagaaagtaagtttttgtatacattgtaccatatttttgtatttttctatttgctattcttgttgatggttttagaagttttactatgttttcacattatgggaagttcagtacaatccatcccagtccccacgcttggcagttgggttaagtagaatggtagagaacgttattttcacttggtcttccatttaccatgttcttaaacagaaagcatgtatgcttcttactaatacaaaagtgaaattccaaatgtttctgaatatcccaaatcccaacaatgagtctaagatgttagtatttgagaataatggtgtttaaaataaaactataatttatattaatgtagccaaatggacaagttatagagactgggcatatctatattggaccaaactatatgaatcagtatttttcattccaaacaggcatggaaatactgttagttgtgctttgttttattagaaattttggagggggctgggcgcagtggctcatgcctgtaatccaagaactttgggaggctgaggcgggtggatcacctgaggtcaggagtttgagaccagcctggccaacatggtgaaaccctgtctctactaaaaatacaaacatttgctgggcgtggtggcacatgcctgtaatcctagctacttgagaggctgaggcaggagaatcgcttgaaccaggaggcggaggttgcagtgagctgagatcgcaccattgcctgggcgacaagagtgaaactctgtctcaaaaaacaaaatatgtattttttttttggcttttggattaaatatttgattagttgttgcattccagcacatgatacttcttatgatttcttgggtagttcctggccacctctcacctttgcacttttttgttgttgttgcccaggatggtctcaaactcctgggttcaaacaattcatccacctcagctcccaaagtgctgagattgcaggcgtgagccactttatctggttgacatcactgcttttttaaaaacctgtactctctttcaggaaggagatttccaagattctgagaagttcctgcctcagagggatgaatttggcttcatttttcagtgcaagcaaaatcatcgtgtttgtgaccttcaccacctacgtgctcctcggcagtgtgatcacagccagccgcgtgttcgtggcagtgacgctgtatggggctgtgcggctgacggttaccctcttcttcccctcagccattgagagggtgtcagaggcaatcgtcagcatccgaagaatccaggttggtgtcagatgccattttaaagttgtaggtgcatttgaagtagaatgatgtctccttttatttagcatcactatgttccagtgtaatgacatttaactctctcataaccaaaacgtgccgccattccagaatgttgtgtgtacttccctatcttagatagagcgcggtaaagacaatgcaagcattgtgattcatttgttggcagcaacataaacagcagtggcacagggcttttgatgtacaggtggtaactgcaggggtgattaaaatgtctaagctgtctaaaagcaggaaaagcaaatagatttcatctcttatgttaacaccaatgagaaagtagtgagtatgagttgagtatgattcttctgtgggctggaaggaaagagcttgctgggggtctctgcttcttggtcaggaagaatggcctcaacttcacttagctatccctgtttgaaaataagttctttcctctgtagatgttttccttgttaatttctgtgcatgcctttaggacctctgccatttctttcctgtccgcttttcacttttttcttactgttgatgaacctatctctgccagacttctttatttccaattggttgatttctactgccttgctccatttgtacgactgtaacaaggaccattctctgcttcccagatggacctctgtgtcctcccatcgtggaggaaacagaaggacaaaatgggcctggttagttccctccagccttctgtaaggacactaatccccttcaggagggctctgccgtagcgacctgatcacctcttagaggccccacctcttaacactgatgctggggtgaacttccaacctgtgaatttagaacaggcatgcccattcaaaccatagcatccactttacacaccatcaccttttcctaagtcgctgtcactcaattgccaggggcaaataatttatatcaccaaggtaaggtcctggcacataatgtatgctcaagtatttgtgtgtttatgaataagttgaaaattaaaataaattggctttgtgagagggcttggcaagaacttgactgtctaagcttttcaaaaatctgctttgttttattcctggttcttaatagagatggatgcccaaggacagactcgagtgaacttagctgacactggctgtgattatttttttatttttatttttttggtaggggagagaatggggtgggtgttgtcataaaagctaagattcttttttatgatgaagtttgttttttaaagatgagatcttgctgtgttacccaggctggagcatagtggctattcataggcagactcccactactgattagcaagtttgtatttcataaaaaatattacctataaaacagaccatacagggtcatttcttatccccattctttctgacaacagcttcaggtaacactgtgaagggatggtccatgcaggtcagtaacacttttttcatgtagcttttgcatcttgaaagaaagaacttaggagtatactttgaccagagtatctttctgagtgtgcaggacacctttttcagacggaagggccacatgtgtattgtgctgctgtaattctctgactgctgttgctgcccctcaccgtgattgcaggtgttggtgtgtgtaccgtggaccagggctcttggaagcctgtacatgttatttcatgttatcctcacaattgaaggagataagcattagtgtccccactttacagagaatgaaactggctcctgtaataggttaaggagtttgcctatcttagaactaggaatctgttcagaaccatgatttcttaaccatggtatgttgcctgttgtattaatctgtttttatattgctataaagaacttcctgagactgggcaatttatattggaaagaggtttaattgactcacagttcagcatagttggggagacctcaggaaactcacagtcatggcggaaggggaagcaggcactttcttcacagggtggcaggaaggagaagtgcaagcagggaaaatgccagacgcgtataaaaccatcagatctcatgagaactcactatcactagaacagcacaggggaaactgcccccatgatccgattacctccacctggtcccacccttgacacgtgaggattatggcgattacagttcaagctgagattcgggtggggacacagagccaaactgtatcacctatgttgctgccttagtatcctctggtgtgggatatttccttcagtattcttttactcatctagttgtattccaaaaaccttgaaaggttctctgtttcttgtggagtcctatttttgaaccctaggtgtagggcttacctgtgtgtgtttcccagcacatgactcgtctctgttcccactttggggtcttttgctctgtgtggctggggtgtcctcccttctgtccttgatttaagcaaatgctactaagccctccggccaggtctcaggagcctggtggtacttttgttcctgccgagcaaggccagtacggtgcagctcagcattgatggacacataatgggcaccaaatgctggatggacagaagcagcaaccttagcaaaagtctggggcccaatacagacccaaggtggcccagcctgcactagaagctagaggaaggccgagcgaggaagcagactcgagttgaatattcccagaacaccaggccttgttcaaggggggtgtgagggtccttaactctggggagctggatttttttcagagtggactggatcggagtctctgcctcgttatgtgtgtccctctgtgcatctcaaaccctcttggacttggtggacctgctcttgtaagagaggggccatgtctgacattaaatatagaccctcctggccaggcgcggtggcttacagctataatcgcagcactttgggaggccgaggtgagcggatcacttgaggtcaggagttagagaccagcttggccaacatggtgaaatcccgtctctactaaaaatataaaaattagtcaggcatggtggtacatgcctgtaatcccagctcctgagctacacgcctgtaatcccagctcctcaggaggctcaggcttgcttgaacccaaaaagtggaggttgcagtgagccgagattacgccactgcactgtagtctgggtgacagagtgaggctctgtctccaaaaaaaaaaaaaaaaagagcctcctgactggcttccaggctgtgaaacaaatggactttccttgggccatgtggagaaatagaaacagtcttacttggttaataaaattagtctgtcttcctggccattatgagataaatgaagattaagatcaagaccatggggctttatatgaacaggtaatagctggtgagtacccactaggtaacaaggaggggcccaagtgccttatgaatactcactccttttacttgtgtaactcccctatcattcccacattacagataaagaaactgaagcctgaggagggtgaatagcacctccacgttttaacagttaataaaaggctgatccggggctttagcccaggccgtcaatctgtctcagaagtgcggccaggcgcgatggctcacgtctgtaatcccagcacttttggaggcctaggtggacggatcacttgaggtcaggagttctagaccagcctggccagcatggtgaaaccccgcctctgcaaaaaataaaacaacaacaacaaaatcagctgggcatggtggcacgcacctgtaatcccagctactctggaggccaaggcacgagaattgcttgaacccgggaggtggaggttgcagtgagctgagattgcaccactgcactccagcctgggtgacagaggagactccatctcaaaaaaaaaaaaaaaaaaaaaaagtgcacattcttatccccacatgcacagcataacctgaatgcagatctcacttccatgcggcagccataaaaaataattgggcaaagagcagccccaacaggtggtatggcggggtgggacgcagaccttgggttctcaccaactctctgggccttggttttattgtctttaaataaggggattggacttagtgtctggaggtcatttcctattttgtctcacttatttagaaaaccgtctgtattagtcagagttctccagagaagcagaactgatagggcccacgtgtatgtacatgcagagagagattggtagattgattgataaaattgtctcacgcaacttggaggtgacgtaagtctgcaatctgcagggcagctggcaggccagagaccctgggaagagctgatgatgcagcttgagtctgaggaggacagtcttgaggcagaattcccttttctttgtaggtcttttttctcttaaatgccttcaactgattggatgagccccgctgacattatgtaggattttaaagtctacagatttaaatgctaatctcaactgaaaaacactttcccattgatacccagacatgtttgaccacatatctggggactgtggcctagccaagctgacacataaaattcaccatcacagtcttttttttcttttgagatgagtctcactctgtcggctaggctggagtgcagtggcacgatctcagctcactgcaacctctacttcccgggttcaagcaattctcctgcctcagcctcctgagtagttgggattacaggcgtgagccaccatgtccagctaatttttgtatttttagtagaggcaaggtttcaccacgttggccaggcaggtctcgaattcctgacctcaagtgatccacccgccttggcatcccaaagtgctgggattacaggtataagccaccgcacccggcccatcacacactctttaatcctcatctcttcttttgggctctccatacgtgactttgtcctcattttccccttattattgaagccatttgtttatagatttctttcccttcctaaactctaaacttacaaaaggcagacacagtgcctcattcatctttatattacgtatagattgcaggtgctcagaagatgtgtaagtgaagtcaacctccagcttcattacatctatgagatttggaaaatgcctaacaactgagcattattttagtgggaagtgatgactgtcgttctctgctgaattatgtcacacatcagagagtgtggcatgaaagggatcctgcagacgattttcagggaattgtggtccaatatgcagctagggaagaaatccttaggattttttatttttttcccaccaaaatgcaactcacctgtgtctaaggcttgaaattcctgttcctgtagatagatgtatgcatgtagtaaaataaaatgaccggctgggaattttacattttccagtggctaactttggcaaggtgctctgtgtccagataaaggatgcatctttgacttgggcaggaaaccttaatttcccctcatgtacatagtttctggtgggagggtgggcctagagttcagcagtagtgattttcagtaaaggagaaacaaatggccaggcatgactggtaagaaagcgttggcgctcgtatggtaaactccttcatggtggtgttgaagtcattgttggaggttttgttttgttttgtttatttgtttgttttttcttcctttagaactttgtgttttttcaacctggatggttcctgtaacccatttaaaattttgtccccaagttcatcagaattacctgatgcactgattaaaactaaattattacaccttggagattctgcttcatcaggcattggctgggtcccaatatcttttgttttgttttgttttgttttgagacggcgtctcgctctgtcaccaagctggagtgcagtggcgtgatctcagctcactgcaacctctgcctcccaggttcaagtgattctcctgcctcagcctttggagtagctgggactacaggcatgcaccaccacacccggctaacttttgtatttttagtagagactgggtttcaccacgttggccaggatagtctcagtctcttgacctcgtgatccacccgcgtcggcctcccaaagtgttgggattacagcgtgagccattgcgctcagcccaatcaatatctttagaaagtgtcctcgtgtccctgaaaatatgctgtctttgggaaaccttgccctagttgtgtgataaaaaaacgcatgaggtcaaaatatgtgtagcaaatagaaacgacgtcaggataacttaagactaaaatcatttgagaggaagcacgcagacacctgttttggtctatgctaggcttttgggggttaagtttggaatttattcattcacttagtcattgactctacaatgtaattgagcacctagcttaagctggcactgtgataaatgcttagatacaatggtaagccaatgcacagaagtccttcctgctgggaacttcctcctgggaatcatcaagtgggggttaataaataaccacgtaattaaaatcagtgctcatgtgtcattgtctttggaaggcaatatctgagatgccatgaggtgctttggtagagatgcccatgccattgtggaggtgtagtgcttcctgcgaaggctcaagaaatagcctgcagcattgtgtgcgtggtagtggagagagatggggaagggtttgggaagggaggtggcttggggcagccaggaggctgatgccctgcatttccctgggggtaattatgtgagaaagctcttaatgttcaagaaaatccacatattttcaattcaccctggctgcagcctggggaatgcattgggggcccagagtagaggcagggagatacgtcaggaggctgatgcagcaagcagtcccggaagatgatgatgggatttggactcagaccaagtagacagccttggatagatttgaaagccattgagagcatgtcctgatttgggtgtggggcaagaggagggattagtcagaaggagggatcagggctactttcgtccttatggctgcaaaatcacctgggttcactgaaatatggaatactagaagaccagatttggggatgaatttggctttgaagactgggatgctttagaactgtgcagatgtttgctacaacacccactgatggggtctgcctggttccgcctcctttcctatttctctaaaaatggaggttgtaaatgatgagtgtaatgaattgatccaatgttcactttcttccttgcctctcgtggatgtgttaatgaacaatgagaaggtgaaaaatggcatcaggagaggaggaatagttctgcccaatatactgatcggaactaagtgagtcttgaccatagatagaccagagcttggcagacacatagagtttagaaaacattgtgttgttaaatttttaaaaaatatttttatatttctattttaatttttttattatactttttctgggacacatgtgcagaacatgaaggtttgttacataggtatacatgtgccatggtggtttgctgcacccatcaacccatcatctaggttttaagccccacatgcattcagtatttgtcctaatgctctccttccccttgcccctcaccctctgacaggccctggtgtgtgatgttccccttcctgtgtccatgtgttctcattgttcaactctcacttatgagtgagaacatgcagggtttggttttctgttcctgtgttagtttgctgagaatgatggtttccagcttcatccatgtccctgtaaaggacatgaactcatccttttttatggctgcatagtattccacagtgtatatatgacacattttctttatccagtctgtcattgatgggcatttgggttggttccaagtctttgctgttgtaaatagtgctgcagtaaacatacgtgtgcatgtgtctttatagtcgaatgatttataatcctttgggtatatacccagtaatgggattgctgggtccaatggtatttctggttctagttccttgaggaattgccacgttgtctttcacagtggttgaactaatttacactcccaccaacaatgtaaaagtgttcctatttctccacatcctctccagcatctgttgtttcctgactttttaatgatcaccattctaactggtgtgagatggtatctcattgtggttttgatttgcatttctttaatgaccagtgataatgagctttttttcatatgtttgttggctgcatacatgtcttcttttgagaagtgtctgttcatatccttcgctcactttttgatggggttgttttttttcttgtaaatttgtttaagttccttgtagattctggatgttagccctctgtcacatggatagattgcaaaaattttcttccattctgtaggttgcctgttcactctgatgagagtttcttttgctgtggagaagctctttagtttaattagatcccatttgtcaattttggcttttgttgccattgtttttggtgttttagtcgtgaagtctttgccatgcctatgtcctgaatggtattacctaggctttcttctagggtttttatggtttgaggttttatatttaagtctttaatctattgtctttcttactcatacttttcaatttccttttttccatgtacagaaaatgaaggttttattgcgaagtttttaggtctaagaagttccgtctgtttttcttttattaaggaaaggattgatggtcttggcattaagcaagtccaataggattttaagagatcttatcttaacagcaaagcactgaaagtcttcaatgacttccacatccagtaaaatgtgtctctgaggttttattgttcacaaagctgcttcagtttttgccaaccgtccactctgaagtcaatctctttgacttcagttctgccgtctgatacttccccaagtgaactttctggggatgcacctcattgctgtattggcaatgtcatttcagctttttcaccctcctgagtgactagagaaagtccagctagcccctccagcatctttacaagccgttcatgtgttgagtggagtctcatttaaccactaaactattatcatgtctgtctccactcagatctgttgtttattgaccagtgctcaataggtttactgtgtgcatagttttttattttgaaggtggggaacttctgttctgacctgcacatacagaatactgaatttgatgtcttggtcatacacttcagctaaaatcagaattttattctgtctagacaaggttaagaagatgtatatataaccttttgcttgttgctgtgctaactgacatagctgattgtttgaataatttaagccgatcatacagtctgtttatgactgtagcatgtatctgtgaagagctgaccccgtgtgcagtgcagtgttcatgcaggtgagtgtgtttgtaagtgcaggatgggggacacatctctgccctgtacataactcagtttcggtcccagctgcagccaccctgagctggttcccagcaggattagtctttgaggtgggccctcaaagacagggtgggattaatactcagggaatcaaggcaaaggctactttgggagtgtgactgtcagtgctgctgggtcatggaagagtttgaagcatggtgtttattatcagaggtgttttcagaagatccttagggagtggtgtttgggaacggtttggttttgatgggggatgctggagaagggaccagtgaaaacattgtatcagtatcacaaatgattgccggtcagtaaacttgtgaaattgggtctggtcttttttctttctttccttccttccctccctcccttcttccttccttccttccttccttccttccttccttccttccttccttccttcctcctttcctcctttcctcctttccttttattttttttgacagggtcttgcactattgcccaggctggagtgcaatgagggaggagccctcatggcctaaatacctctcaataccatcacattggccattaagtttcaccacctggattttggaggggaagttgtccaggcggcttccaaggcctggagactgtataggaagtttcctggacgttgtcactttctgttgggctgaacttaaagtcatgtggctacatctaactgtgttgggggctggagagagtggtccttgttcaaggctgctgtgcgttggctaaaaatgcacagaaaattagagcaggttttgaggagagctgacagtttttgccacatctacaaaattttggatggggtgggggtgatctaggttgtttattctgtttctaagccactgtagcttctctcactgaattatgcctaccatttgaggagcaaaagggagttttcccatatatcattatgttaggtttgttatggttaacaggactttgttttattcagttaaattgcattgtgtagttgctaactagtgtggaaaatagcaataagcgagagattggtccgttctgctgtctaggaggggacattgactaaggaaaaaagataagtgtaggtgtagcatggtggcttatgcctgtaaacccagcattttgggaggccgaggtgggtagattgcttgaggccagcagttcgagaccagcctggctaacatggtgaaaccctgtctccagtgtaaatacaaaaattagccaggcatggtggcagacacctgtaatcccagctacttgggaggctgaggctggagaatcacttgaaccggagaggcggaggctgcagcgaaccgagatcgtgccatgctttccagcctgggtgacagagtgagactctgtctcaaaataataataataacaataataataggtgattgtgaaaagaagcttataaaatatgttttaagagatagaaaccttttttcttattttggtaaagaacactgacttaagtgatagtgaattaagttgtatgtcaatttgacgtgcacgagggaggagaaggccagttgaatctaagtgactggccagagccagggctgccttcagaggctctgccctgtgtttcctgcctacccttctgggctcacttgcttcctgaaggctgggaatggccttgactttcatgttgccagcatctagcgcggggcttggcacatgatgaggattcatgaaatattcatcagatcatttccaaccaactcccgtgttcaccattagtaacacaaaagtacaacagtagaactatgcaggctgtcaatgcactcagtctcagagcagtattttcggtttatttaggaacaagtatacttgttgaaaaaaattacacagatagttcctaaaattacaaagatagttcatggccatgaactctttacatgtttatttattaaataaatatcatatgctgatgtgaaccgatactttaaatagggttggtaaaatgatctgtaggctgtataaagttttatgttacaaattccatggaagcagtgacttttgtttgtgcttttgtttctgtaatttaaacaatctgtgtttttcccattttctttagacctttttgctacttgatgagatatcacagcgcaaccgtcagctgccgtcagatggtaaaaagatggtgcatgtgcaggattttactgctttttgggataaggtaacatatccttaatgcaagatcatgactgctgaagataatgagtgacattgatttaatagagaattttgaggtgttacacatggtataaaatatggcttgcttatttactgaaactatgttacaaagattctcaaaattaggagtaagttttgcaattaatagaaagtaggtatgaaatcagacttaggtatttgacaagttgtattttatctcattttcaaaaaaccaaggaaagtgttacctcgttctaaactaaatgtcactaagtttggacattggcaacgctggattttataggattggacagactaggggtgcagcatggaatgggttaactgctgagtacattgtagattattacggagactttggggtatcagtgcacattttcagcttagcgttttcaggtcatcttattacatattgagaaagcccatgacttggatttttgccacggggttggggtggggctcccctattccaagcatctggatgttgccagctgctttggtggcagcccaaggccgaggggaggctgcaggccggcgtagcaagctccatggattcctgactgaagggtttcaccgtgtggtaagcggacaggtagttctggcaaggccacaaggatttttcaacacttggtttactcataacatttaggcaaatgggaccaacagcaggggccacccacaagaagtactgaggctcggtgcatctcctgttatccacaactccagtgccctcctcatgcttccaaggaagcagtgggctccctgcccagtgctcatagacgccactactatggcaccagcttttcatgaagagaaaggctgtattgtgagtggaatggcaaggagacaggaggcaacgctcaaatttgtcttccctagctgggggatggggcaggttttataggcagagggtaatgaggcatggtccgattgggtcttgcatgatgccagagctggacctgatcggatcctggatcatgccatgaggcgttcgcctctgaactcgttcctccttccttggtcctagcacttgggttctgcccatggttgcctgcttggttcatctgggaatgctcagattacgtaacttgcaacctgggatccatggtgactgaaaaactgtttactatgttattacacaaagttgaaccagattgggctggttctgcggttacgctcacctgagtccggggtcctctgcaaatgcacttgtctcagtctgtgttagtctggaaaacagaacacacagcatgggagagggaattttgtgcagggaattcgtttcataggtgatgaaagaaagagcacaaagggaaagcaggggtggaggaggccaccccgagatcagccacggcaggaagctgcaccccggggctggagatgatgtctgccaggagcagagcccagtggcccagctgccagcaagatttgggagcagagggcgagggtctcttctgagggtactggaacagctcaggctgcttaaaacaggtgggcagtgctggtggtgaccagctcctcccctctccgggtgctctttgtggctgaccttgcgttgtagcgtagtttgctggagccaagagccaataggcggttgagcagcactcctgcccagccccactgcctccgtcctcccctgtgggacaaatgtcaaaactctctagactccagactcttcctttctctacatgcccttggctctaagtattgcactccctgtttcatgtttgcctaattctgatgtaatttctgccatctctaccaacaaaacaataatgtgttcccagatatttagaacatcatcgcatcttgtgcacatggaaactcacacaaggtgacagtttctctttatctgctggcattcccaccctcatacactttatttatttatttatttgttttggagacagagtcttgctcttttgcctaggctggagtgcagtgctgtgatttcggctcactgtaacctctgtctcccagggtcaagtgattctcctgcctcaacctcgtgagtagctaggattacaggcacgccccaccatgcctggctaatttttgtatttttagtagagacagggtttctcccatgttggccaggctggtcttgaatttctggcctcaagtgatctgcccgccttggcctcccaaagtgctgggattgcaggcatgagccaccgtgcccagctctaatacacttcaagcattgacagacagctctgtgaacatcccactagaaaaaagcactctaggtgaatgctgttgagctagaggaaggcactgaggtagctaccacacactgtgtaggtcccatttgcaaatttcttttgtaccaaaccctgcgatattgtaaaatggtctgttttgttgtttttcggttcctagataacattgacagctgcattgtaaacagaacactccatcctgttttctggccttgtcttggggtgattttgcctcacactggcagggattattagggaggtcctgcggctgagagggtgctggggtgggaggaggggcacagacacgggcttctggagagaagctgcagaggaaagaagggtgtgctgggctgggatttcggagaaagacagagaccccagcagcagtcctgctggatagaccagcaggtattggagggaaggtcttctcaccagcctaggtctcatttataaaacaggggcttgggctgaagctgtaaagtctgtggccccgtgagagcctgtgactctccatggggaagggatttgcttctgctttcttcactgctctggccccagggcccacagagtggaggctcagtctgcctgccttagtgtgtcttggagcctggggaggtcccagagggaatgggcctagccttctgagctgtcgagtgctgcccccttctggctgcagcccaccagtgctgggtcccaggcctcccggcggggcagaaacctgctctaagaaccagggccttgatgggaagctgggttttgcatgtggctcactcttttgcagccaaaactgaataaaaagaagtaaaatcagaagtagttgttaggaaagagacacactgcaaaggaggggaaagggacaggttgaccggttgtgttttttcatccttttgtaatcacagaaataagtaggtttcagttgtcttaagagacagatgttacttaatcaggaatacagagtagacccgttacattttagaggaggaacaccttatatagtaaggcgaagtcaagcaagactttgtgaatttgtgacaagtttgcacttaaaatcgtgtaaatatgtcacattttgtttaacgttatttttccaagtgtttaggtaatgtattacttttttaaaaaagaaatagttgttaggcatgtatgaaggagtaaagaaacctattctgggtggttgttatataattcctatgaaatctggggctaatttctttgtgcttaaaagggatcatgatcgttttggtctgcggccatcctatgatgtggtatgggacacataaggggtcagttttcatacacacatattttagcatttgaccatttatagaaatatttgtgattattcggatatgtgaccattaagtcgtttccaggtaaatttttcattttgaaggttatcttgatctcttattcccccaccgtgctttctgtcttttgggcattttactaattgcacatgcccgcttgagatgtggagaggggttgatgagtaactgtgggctgcgccagctcagtgtctttaggttttgggttggttgactccatgcgtgcttccctcttccatcatcccaggggtgttccacccttcagggacgccagattcattttgaagaatccttttctagagttgaggaggctgcattgcctttgattcattcttgatcatttttctatgatatggatgagcatttaccaaagtgtgtcgtgcagaagaatagccacttccgaaaggatttgggacttgaataaatttgctaaatgcctacccaccagacatgcatggtcaggtctctccaatctatccacgagaaattcagacgaagattataaatgtgctgcttaaacccctttaggattcctcccaaattgtagctgtttttactttacttaacagtatcaatttttgtctactagtgttgatgtctgggtttggacaaaagttcttagagttggcagtttttacggttgaggttctatactctgaatttaaaaccattcctctctttatttgtaccaactgacttttgcttttttaaaagatagataattcaaagtactgattgtccttgtatgagaagaggaaacctcctcattttggtttatcatgctctggtaaactatccctatcatgctctggtaaactatcccttctccctgatacacacttaatcctctcaattgaaaatatttagaagctctttgtaaaagtaatgaatttgatttggtctcctaaataataaactgcaaaataacatttttttgagacaaggtcttactgtgtcacccgggttagagtgcagtggtgcaatcttggctcactgcaacctcagcctccggtgctcaagggatcctcctgcctcatcctcctgagtagctgggactatggcacacaccatgcctggctgatttttttttctttaagagatggtttctcactatgttgccccagcttgtcttgaactcctaggctcaagtgatcctcccacctccatctcccaaaatgttgggattacaggcatgaaccagtccgtaccctgcctaaaacaacttttttttttttaacattagcagtgattgataattttgttaacatttagtatatgtaaaaacatgcatatactcctgaatctttttatcatagaatttatagattgtttaggaacattatttctgataccctaatgagtacttcatcccttcctccctttgtgctggattgaatgctgtggtgggtacctcagtgtttatagtagaactactatgctgtccctattttcccaggatgggtaacacaagctgcaggtgtaacactgagactttcactttgacctatgaacatacacttaatttcattattcttcagtttttggttattgttaaattagagctcttggttacagggttgaccaccatttgtagaagttcatttgccaagagtgactttatagtataaagtgccttctggctggctgggcataactgaggttcatgctttatcaagtgaaaatggaaagattagtggagatttcaagtcatccattagccaaggactgggcatgccatgtactcatgctgccaccttgtggaggttaatgaaatagaatattaaaaccaagggacagaatgaaaatttacaaatggttgaaaagctcccatactgaatattatattaagaatattgccgggcgcggtggctcacgcctgtaatcccagcactttgggaggccgaggcgggcggatcacgaggtcaggagatcgagaccacggtgaaaccccgtctctactaaaaatacaaaaaattagctgggcgcagtggcaggcgcctgtagtcccagctactcgggaggctgaggcaggagaatggcgtgaacccggaaggcggagcttgcagtgagcggagatcgcgccacagcactcccgcctgggcgacagaacgagactccgtctcaaaaaaaaaaaaaaaaaaaaaaaaaaagaatattgttttaaatgagaacacatggacacagggaggggaacattacacatacggggcttgtcggtgggtggggggcaaggggagggagagcattaggacaaatacataatgcatgcagggcttaaaacctagatgacaggttgacaggtgcagcaaaccaccatggcacatgtatacctatgtaacaaacctgcacgttctgcgcatgtatcctagaacttaaagtaaaaaatatatatatattgttttagtaagttagcatgagttttcatttcaagaagcttgtcttgtcatttttactatctaaattttgtggaagtctggagctgtgttcacatgaaaatctggtaaaagggaatgggccttccttaagtactgaagactccaaactgtgtaaaaccccaccaaaaaaatatgattgtatgaaaaggactctaggatacaatatcttaaaataggaaggagaaagatttgggttatgttcatgtatcaatgactgttgtattgttttcttctctttttgaagtgatttgtgtgactttattgaaatgggcacattttataaactttaatttgtaggcatcagagaccccaactctacaaggcctttcctttactgtcagacctggcgaattgttagctgtggtcggccccgtgggagcagggaaggtgagttagaatggcttttggcagcttgttgcaaccccacttatcatattaacttcgtgggtttgagcccaaggctacgtgtaacacaattttgaactgggtacacttggcacggcatttctcagtgcatggaacattcgttttgcaagaagggtcacatgaccaaataaatgtggacaatgcatatcatgtttcccttggttcttcaagttgagcaattgggaactcctagaagttggacatctccatgaaagaaattatttatgtgaccactatgcaggatggattgactaagaaagtgggaacttctttttgtcagaggggaccctagatgctacaagacatctggaggttatgaaggcttgtctgaaaagctttaaacatgttttgatatgacttctccaagtcacatgaacacacatttaataaacctgtagccaggtgtatagtcctgtgttaggagtaaaagatacacctgtaatcaagacccagacgccactgccctccagaagtttctggtatctggggtgagacagatatacaaacaggtgatttcagttcagtgtcgtaagtgctctgatagtggggggcacagacacgtcatgtctgtgcattgtagaagatgtgaaggaaacgtgcgtacagacttagtctcatatattctaaagcaacgcaataaatctagttgtaggtgtataacaaatagggtggtttaacaattgaagtttgctcttcagagacacgattcttgggtatttaaaaataaaagtccttcctagtgcacaggatttattatttatttttatttattcattcatttattcacgtatgtatgtatatttagtttttgagacatggtctcgctctgtcacccaggctggagtgcagtggcgtgatctagagtcactgcaacctccatttccctaggttcaagtgattctcatgcctcagcctcccaagtagctgggattacaggcgtgccaccatgcccggctaatgtttgtagttttagtagagatggggtttcaccatgttggccaggctggtctcgaactcctggcctcaagtcatccacccgcctcggcctcccaaagtgctgggattacaggcgtgagccactgcacctggccaggatatgttatttacatacagcatttctaggattagttctttgtcaaaaaagatacccgcatgcaggaacaatgcattcagtattggatatatgaactatatatgtcatgcttggctactctgttgctgtaaacattcttagttgatctttgttccgtgtaccatttcatttaggggcatgaaactcatttagggaaactcattagggcagagtagattgttacactctattttgttaatattccttataaactactagtttatgtggaccattatgttatttccaatttttaatcacaacttcctgtgctcttttaaatgaatgaatggtgtttttcaagctcccagggctgggcaaggctgcattgcagtggcttattcttgtctcgagtgttgactgaacatgtgcttttttacaatctgtttcagtcatcactgttaagtgccgtgctcggggaattggccccaagtcacgggctggtcagcgtgcatggaagaattgcctatgtgtctcagcagccctgggtgttctcgggaactctgaggagtaatattttatttgggaagaaatacgaaaaggaacgatatgaaaaagtcataaaggcttgtgctctgaaaaaggtgagtgatgacttttggatttcatgtactcgaatgtccagtaatactagtgttcacttgaacaacaaggtttattaacttttttttaatttttaaagacctttgaatgttatttaatactttaaggcggtcctcccagtaaataaacacacacacgctctgtccttttaagtctgatgcgaaaatgatgtttacagggtgaatttcgggggtttggttggttttgtgaagttttatttacttttaacttttctttttttcaaaatggacaattataaaaatttgcaaaagtggagagaagggtgtcttgaacctgcctgtacccattgctcaagttcaagtgcgatcaacttgtagccaattcaactccgtctctcccctggccctctgctagctccacccccaacccagattcttctgatgcataccctcggcctcaattgtattttatctgtaattgtattttatctgtaataccttattacttatctctagaagataagaacacttttgaaaaaaaattacatctcactcaagaaaaaaaatcaccagaatttcttgctatcatcaaccggctaggcagagattacagtgctttagtatctcattacccattggtttgcgtcagactccggaagatgtctgcaccgtgcacttggctgatgtttcctgcttgggtccctctcaaaccacaggtttccttctccactccccttaaaaaagaaaatttgtttcagtagattttggggtacgggtggtttttggttacatggataaatttacagtgcaatttattatttaaaggaaactgttttaaaatttatttttcattgtgtatcatttcaccaagagagtgattgttttcagaaaagatgaagtgtttgattgtacactgaggttttcataaacctggtggatagttgatgaaaactgagcatacttaatagagggctataagttctagaagatagaaaaaatggtaaatactgataaatactatgttaccttctttgggccataaaaatcagtgaataatggcattaaagggctctccccaggccctgtgcagtgtggcctggacatcctactgttcttttatgctgtctggaaaaggccgccacagactgtcacaggtgtgatgcagaaggcttccagccaggtttgtgaggaatgagtaattttgcttgaacaatggctggaatatcagagtctgtcaatcaggtgagtagtatttgctggcgatttggatagagaaatcattgcttgtttaatgggctgtttcttcatcctggactattgttaatgagagatgatgcattttcggaaatgacattaagttagcagtaatgagctagatttttattgaatagtatacactatataggaaaagatgcgctaaggcaagctcctagttattcagatcctaccaggtcttatttttttttctctgtctcacacgctcacacatatgcacacacaaagctgtgtaaagttttaatcttttgccatgatttcccagtgcctttgctattgctatcctcattttgtttatttttctgatattgctagcctcgcttttttaaagtaaaattttcattttattcaaagtttgtacagaattgctaacatttccctaaaataattactatacttcagcttgtcctgctctggtgtccccccactgtcccctgcttccctgaagatccattttagagaaattttgcagaaatatagggtcaaagtaggagaatatacaaggtgatttcagtgtgttgcagtgagtggagtgtatcatgttttagggagttgagaaacagatggcaaattttgctagttttcccccactggtagttacagttgataaccaagaaactgctgatggaccaggccccggagataggaaagatggtacgccatttttcaatggaagggtggcacttggcaacctgggccttgtctttcagctcttttcttccatcatttctctatgacaggttagaagtgaggtccttgggaccaacacagggctttcttgggaaggctttgttgctctttacctactaatctgtcagtttggagataacctactagtaaactctagaatttaagaatgatttgttcaagactgtggtttcaagagttgaatgttgcttctggctggtaaagtggagggttggagagataaaatgactcacttgaacatttgcagttcaagttcaaagccatacctgcctagctccagattccattttcccctctgccaggcacctctcagttgggggtgtttataaggtagaaaactattttaacaattaggtgattgataaaaaggtagaatgtgggacaaaatgtttttcaagccttccctttttacctgttcagcttctgatacccacatgagactccaggtcccaggtcacccagctctgccttgctccttcccacatcagaaagtctctgggggaaagtgggggttaggacagtggctgccattcagcctcttccgtagccacctttgaggactggcccagtaactcggatagtgtcccaggcacctgcgggcttctgcgtggcaggcagactccagtggcaatggggtcccctcagggctgggctgcatggcgacttcttggttccttcctggatgtgtgtaagcatggactgctggccccctgtgcatggttccatcctcggtaggacggtgggcctccggtggagaagtcgaacagagcaggagtctggcccagctttgtcatttgctcgctgtcactttgggttttttttgagatggagtctcgctctgtcacccaggctggagtctaatggtgtaatctcgcctcattgcaacctccgcctcccaggctccagtgattctcctgcctcagcctcctgagtaactggggtcacaggtgtgcgccaccatgcctggctaatttttttgtacttttagtagagatggggttttgctgtgttgaccagctggtcttgaactcttgacctcaagtgatccacctgcttttgcttcccaaaatgctgggattatttgcatgagccactgcgcacgaccagctcggtgtccactttggacttgtcacattacttgccttgggcttttgatgtctctgctgagaaataaggacatgggatgagatggtttccaagaaattttgctaccattctcaaatgccatttatgactgtttagcaggggactggaagaaaccagggatcctcttaatgagttatgagatcatttgccgactccttttcaaatccacgtgtcaatggtgggtgttagatggccatagagaatagcaatactggaattattctggcttgtaggtacagagattgcatgtgtaatcaaaacctgctggacagaaatggtcctgagcgtctctgggtgtttggcctctgtttcatttcttattaaatgggggagatacagcaggattataaagactgcaggcaatgtctgtaaaatgcaaacatgccaggtttttggtaaatagtagctgttgcccttttctctaaatcagttaataagataaataaaagattttgccttatatagttcctcattcccctcctggccaccctcccccgcaaaaaaaaaaaaaaaagtcctagaggaaaaaataggaactaacaagatttctcagatatgttgatagcaactagatatattgtactagatacagttgaagtaaatttataagttcatcgagctaaaaatatatttgagataaaataataagataggaagtagtaattcacatttagcagtattgctttaggctaattatttattcaaagagatatcgtagcaaatgacaggacatacctcaggaaacaacatactaatgttagatactttagtgggtagtagttaaaatccgaggccttggggtcagacagctctgggattgagtctcagttcctcttcagtaggtgtgtgattttagctaatcgtctgaaccttagaaagcctcagttttgtcatctgtaaaatagagataataaactattcacctcataggctattgtgaggataagatttgatcatgaacttaaagcatctgattactaggcacataacaggccttcttaattataagagccaccaattttgggtaaaatcacatgaaatgtgacatgcttgaaagaatgtatctgagtatataacttccattatttgaattgatatttatatagggtttctatacatagtacagtaaataagagaataataaaaatattgttaccctaatagatgcaatgtattaatattatgtcaccctttgcatagtttcttttaatccttgagcacttttaagcagtgtgtatccaaaggcatggaattgataaattggagtttaatgtttttctatatagctcacttgactctacaaacccctttggtgtacccactatcttataatttcttctcatatttgccacattcctgccaacttggacattttctttttagattgccttgacaatcataaaataactgttgttatgcctttttgttgttgttgttaatctctcagttgggagaaccatatcactccttagtgacataataggaaataaatgctgagggcccggcgtggtggctcaaacctgtaatcccagtactttgggtagctgaggtgggaggattgcttgaggccaggagtatgagaccagcctaggcaacatagcaagaccctgtctttttttttaaagctgagtacaaaagggatacaatgaggtgaatctaactagggtgactaaatgaactgatagtgctgtatatggatagagagacttcgagttctgagttgtttcagtattgcctttaagtaacttctagcaagcacttggggaagcatgatatgaaagggcaacaggctgtgaactgagatgagcttggttcagactccagccttcctttattaactgagagtcctcagtccagttacgtgctctcacttcatctcagtctcctcatctgtgaagtgtggtcactacttacttggcaggttgtcatgaaggttagagataacaccaggcatcaggaacagtggttggtgcatagctcttacatccaggagctgacctgtggagcaagaagctgagtacacacataaacattaagaggcagaatatggcaggtccttcctaagaaatataaacaaagccttaggaacctagaagagagagtgatgttttctgattgggggactgcaggttagtttcatagaagagtttgagctgggccctgaaagaagaataggatgttgataagctatgacaggaagggccattccaaatggaagcaaggtgtggcccaaagctggagagccctgctctctgactctggggcctcttcttgtgctggggcctcaggcctggcccctgtgaccatccccatagtgtcctcagtggtctttctgcctttagtgtcaccatggttgatgtgcacatggtaggattctggttagatggcgtcaaacccacatagccacgtcatggtttttctctagtttctgtgtctgcatttcagtaaaggtggtggtagattaaataattggttaattttactgagtggtacctaacgtgcatgagataccttcctcccattgggagcacttctgctttctgctcaactgtttccctttagccaaactagaaaatcatggctaggaaattagcctgactcagattgtacttcagatcctttgaaatattttccctgtctgaggcgtgtccataaatagtttgccaagtcaacaacactcaaggtcgttgtagtactcaaagtgctactaccaggcatggggagagagctccttccctattccctgtctgcatgaaatgagacagatatttttagtgtcttttctagaaaatggctaagattgctctgctacaacttgatgctattttgagaatgaaaacaaaacaatgtaaaatcaaggcacagaaacttaacacattatataaagaccatcagcaatggaatgaggccaagtaaacaatgtgtgtttgtgtttgtgtggaaggctgggaccctgtcttaaaatggtgcattgtctttttatgaaaactgaaaggaagagatagtgttaactggtgcattgtctttttttttttgagatggagtttcactcttgttgcccaggctggagtgcaatggtgcgatctcgctcactgcaacctttgcctcccaggttcaagcgattctcctgccttagcctctcaagtagctgggattacaggcatgcacccccatgcctggctaattttgtatgtttagtagagacggagtttcaccatgttggccaggctggtcttgaactcctgacctcaggtgatccacccgtgtcggcctcccaaattgctgggattacaggcgtgagccaccgtgcctggccgcgttgtctttttatgaaaactgaaaggaagagatagtgtaacttctgagctcaacaaagagataacgtgaaataatgaattttcataatggggcacttgctacctttcatttgatgccatctggttcagattggagtattaggggactcctgtgtgtcttagtgggctgccagggagtgggttccaatggaaatactgtttttttccatttggtgatgtactttatttagtgggattcatgctatgaatggggtcctgctgttggtttgatcagaaaatatgtcatagtcatcaatagcaaatgataatgaactcagatccttttttcacttagagagttcatacccttactttagattgttccggcattctatgagtttattaattcttgtttctccaggatattttgtaaaagagataaaatgagaacttagggaggtcagaggatttgcttgtcatggagatctcaatgtgccatttgctttgtctccccggctttgtcagagtagagacaaagaaatgacaccttgatctgtaagagggctatctctgtagtgtcctaggttgatgcttatgcagctcagtcaatacccagcgatgttctccacaccttttgtctatgctaggatctgtctagtgataattataggccatccaagtaaagatttctaatgtaatgtcctgtaacttaaacctgatcattatcctgttattttcagggatgttcttgtcatgtttttttaaaaaagtattatgctttgtccacttatttcttaaataatttttaaatataactttggttggatcctcaaataaaaacttgttttccttcctagcttttgttttttggggtcttgcatggagccagagtctacttagtgcaaccagtctgtgcagtgtctcatgagcactctgctcctttccctttggcttttcctgactgggctgctctttctgctcttattctttgcagttttttttctgtcagtctattgtgatgccttaagcatcactgtgaagatggggcgggtgttatcccttctctgagaatggaaagctgaggcaaaagtcgcaaaatggcttgtgaagacacagttgttccttagtaagtcccgtggctttatgctgacagccctcacggttgggtctccagcacagacctccagactcacttatccagccgcaagtcaggatagccggtcagcatttcagtttggccataatcaaccttttgattttatctcttgaatctgcgtccctcatttcccccagctcagtaaatggtaaccctgttcttcccttgtcttacaccaaaaccaatgcagtcctcctctttttctatcacaacacaaacccatctcatcagcagatcctataggtgctacctttaaaatttgttcagcacatgaccactgatgttcacttccttgttccccactccggtcccggctactgttgtttcttgtctcaattattgccttgatcagatcatgtccttcctcctatttccctgggtgtgagcccttggcttctcttgcctctgtctctgccctcccctgccatcatcctgtgctcgcagttccgtgtgcatccatattgctcttctgtgaacaccttgggcacgtatcaccccatgggttttgtgcttgctcattcctctatggagcactcttcctgcactctgtgccagccagtccatcccctgacaggtctctgctcagaccccctcgatcagagcccttgttgacctccctatataaagtggactttccctctgtcactctgtctccctaagccagcttccttctccttcttagcacttatcacctcttacatttgtgtcaatcttttattgtcaggtcactcactgtggaaactctttcgctgctgaattcacaaggagttgctgctcaaaaaatttctgttaaaatggctcagtgcataaatgctatgaaaagctacagcattaaaatagataacgtgccctgactgtgtatttgataggttcaaacttacaatttagttactatgaaatatttccattgctgttgatcaaatacatgtaaatttctgaagaactaatgtgcaaagtttaggataactttggaagaacacaaagaacagaggaagaacatgttttaagtctctttttccccccttctttcctttgtccatacaggatttacagctgttggaggatggtgatctgactgtgataggagatcggggaaccacgctgagtggagggcagaaagcacgggtaaaccttgcaaggtaagttgcatttcagcagccactatgccggtgtcttttgataccttccagtggtggtgagcacataggacctgcttactgtgtattgcgtcctgtgtgaagcaccttcttgggttattctgttggcatttgaatgaacatcccagttgttgaaagttgtcatgttcctgggtgagagtctgatacctctttgtattttctagagcagtgtatcaagatgctgacatctatctcctggacgatcctctcagtgcagtagatgcggaagttagcagacacttgttcgaactgtgagtgtgtttgtgtcttaagtcatttctgcttttccagagccatttcgagttggctcaggaaagcctttatggctttcagctcatcctgctctggtgtccgctcccctccccacactgtcccctgcttccctgaagatccattttagagaaattttgcagaaatacaaggtcaaggtaggaaaatacacaaagtgatttcagtgtgttgcagtgagtggagtgtatcatgttttagggagttgagaaacagatggcaaattttgcaagttttcccctactagtaattacagttgataaccaagaaactgctgatggaccaggccccggagataggaaagatggtacgccatttttcaatggaagggtggcacttggcaacctgggccttgtctttcagctcttttcctccatcatttctctatgacaggttagaagtgaggtccttgggaccaacatagggctttcttgggaaggctttgttgctctttacatactaatctgtcagtttggagataacctactagtaaaatctagaatttaagaatgatttgctccatagtagactgtggtttcaagaatctaatgttgcttcatggattcttaccagagtgaacacttaaaacccacagacatgtaggcctggcttgcctttgaaactagttgtctagaatctggcttccctcccaactcttacgtggtgtttctgggattttctttctttggctcttgcttagacactgagccatggaggtagaactactctggaatcttttctgtatattctataaactcatgtgtgccgactgacacttcctacatagtctagactggcctttttgaaagcattgtgaactggttttgccaaaacagcactcacatctgccccacagtcagcttcctgtttttcgccttgttaaagtcagtgagcctttcccactcattgtaacccttctgcgcacactgaggtagatgctcctgcagatgctactgcatgaaacatcttcgcttgcagaggagggcagtcagccacagagaagataagcacccatgctgggctgagtgagagagagacaagttcagatttcattcttgcccataaggaatttgtctctgcatggatcaagactaagtgcatgggaaaagttcaacagaccccaaggcttaggggatttcaatataggacaatctattttattattattatttttttagataggatctcgctctgttgcccaggctggagtgcagtggtgcattctcagctcactgcagcctcgacctcctgggttcaagagattctcctgcctcagcctcccgggtagctgtgactacaggctagcaccaccatgcccagctcattcagtgtttttttgaagagagggggctttgccatgttgtctaggctggtctccctatgttgcccaggctggtctcgaactcctgggctcaagggatccaccccccccccccccccccctgccctcggcttcctggagtgctgagattacaggtgtgagcccctacacctggcatacgacaatctttttttttaaatggaagaagtgggcagcagagattggaaaggtcactgagggccgggcttggctggaagtagcctgtggtcctgcaggctggtaagggtttgtggtggctgagagtaggattcaattcctttgaaagaaatagtagaagcagaggtgtgcagacgggaaggagtgaggcctgtgggaaggacagcaggcaggcacctgttcctgtggtgggggatagagaaggtaccgtgagagaaagctctggaagtcctgtgttggccagccagggctgccctcacaaaatgccacaggctggggggcttccacagcggcaggttgtttctgcagagttctggagactgcatgtgtgagatcaatgcatctgcaggtgcagctcctcccgagggctttcttggcctgctgatggctgccttctcacccttttctccttgtgtctctgtatccaaatctcctcttcctgaaaagacaccagtcagattagagtagggcccaccctcatggcctcattttagtgtaattacttctctaaaggttctgtgttggccgggcactgtggcccatgcctgtaatcccagcactttgggaagccgaggcaggcagatcacctgaggagttcgagaccagcctggccaacgttgtgaaaccccatctctactaaaaatacaaaaatcagtggtggatggtggcgggtgcctgtaatcccagctactctggaggctgaggcaggagaattgcttgaacccaggaggtggaggttgcagtgagccgagatagcgccattgcactccagcctggatgacgagtgagattctgtctcaaaaataataataataaaaaaaaaattttaaaaaaggttctctgttcaatttctaaggtgctagggtgagggctggaacataggaactttgaggggagcatggttcagtccataacaagtcctggatagcaaagtggatagcgagtcggctgtgtgagagtaactcatctctgggctctggattccaggggtttggacatgaagtcatccactgagcatggggctctacgtgggttcctgaacgtttacccaccagagtgcgtatgcaaaatgtgcctggtatgggatgatgaagtggatgtgtatgatggtgatggttgcacaatggtgtgtatgtacttagcgcgaccaagctatacaattaaaaatggtgtaaatggtaaatgttatgtcttgtctatttttccacaaccaaaaaaaacgtggatggcagcattgaatctttctgaatgcagagtgcaggataagctggcacttggcattgccgcagcagtctgatcagagcctcgtttcctgctccctcctcattgtgccttgatgaattttccatttcgccgagaagggcctctgtggcttgcttgagtcttgcgcgaggccccaccagttctttatcactcaaacaacaattcccggtgggacgctgtttagagtcgccgcggggaaggaggaaggtattttcattgctgagtatcagtgtgcgtatcgcacaagctcccccagattttcatttgaacacaggaggtatttataaagtcctcttgcacctttaaggattaatgactttggatatatgcttgttagaagcaagcttgttaaaattgttgtttgctaatcagaatcacattctttggggaaacttagggcagggagcacgaatgcaatttaggaaatcactcagcagcaactggagaatgttctcaacgagttagaaaattggattgaacaatatgctatgaaagatggcggttgtgttgaagcttagaaatgtgaagtgttttgtattaaaagtgaatgaattacgcttctatttgccattaacagttttacttcaatcatgaatatatatcgagagttgttaagagttgtgttttacaactatatgttgcaaacactaagtggattttatcacatacaaaaagtgagggtcacttagattaaaggatgctaatccaatttgttgcctgctatagatgtggttgtgttctagaaagcctcaaattctcagacccctgcctctttgagtctcctaatcagatctcccacactgttgcctacctatttgtcttagtccattcaggctgctgattcaaaatagcataaactaggtactccatataaacaatagaaaattgtttctacagttctggaggacaagattcaagatcaaggcgccagcagttttggtgcctggagagggctcacgctctggttcatagacagctgtcttgtcactgtggaaggggtacggcagcttccctgggctggccccttctactaataccatttgtgttggcagattctcatgaaataggcctcacctcctaataccattacattggtgattagggttcagtaggaatttggggagggccacaaacattcaggcacagcactagttcaccttccctctttcaggtcctctaggactcccctacttttaagctacagttctaagtcctcgaatggcaaattgccctttgcagtctgccccattcacctttccaacccttgccatgcaagaccagtcctccagccatgcacacttctttggggtgcctggaaggaggtgtgaatttctcacgtctgcctgtctgtaagggtatttttcctgccgttggacaaccagggatagtttgcctgggcaaaagagaaaaatgaaagacacagatcctacctcctgcctttctcttctgctcctcggagggcatggcgctttctctgtcttcccacagccctcaatgagctgctcttgatccacctatgtgttcttccctccagcccccgcactagactgtgaatgcatgaaggtgcctttgcacagcgcatttgtgccccgggaccattgcacctgctgtatctgccaggaatgcttcccccagatagtctcatggctcatacatcacctccttgcagagaggactttcctggccactccctctaaagtacaacctttgcctggctgtctcttcatggtttactttactatccaatagtgtgttttctgtgtttgtgtagtgagtgtccctacacgactcagggtgttgtctgtttgcttgaccagtggatgtatcctcatcacttagagtagtccctggtacttcgtcagtgctcagcaaatgtatcttaactgaatgaatgaaggtagtgactgtatctgtccctctctccctccctccatcccttccttccttttttgacagagttttgccctgtcacccaggctgaagtgcaatggcatgatcacggcccactgcaacttctacctcctgggctcaagtgatcctcccgagtagctgggactacaagtgcacaccaccactcccggctaagtttcgtgtttttttgtagagatgggatctctccatgttgcccagactggcctttaactcctgggttcaaaagatcctcctgccttaacctcccaaagtgctgggattataggtgtgagccactgcaccaactgactatatctttctcacttgtgtcacctccaacattgtatgtgtcagctcttaatgttgtcttttttttttttttttcctttttgaggcagagtctcgctctgttgcccaggctggagtgcagtggcatgatcttggatcactgcaggcctcctgggttccagcaattcttgtgcctcagccagccgagtagctgggattacaggcatgggtgaccacatccagctaatttttgtatttttagtggagatgggatttcaccgtgttgcttgaactcccgacctcaagtgatctgtctgcctcagccttccaaagtgctggaattataggcgtgagcccccgtggctggcctcttaatgtagtctttatgtaggattagagttaaatagctcattgctacatcaatcacttattatttgtttgttttatggcatgactggaagatttttactcttaataatttggaaagtattttttgagatttgcctaagaagcataatttagaaaaaatttcaagccatcaattacaatgttagtgtaattatttctattatctcatctacaatggaagatgttaggaagaaaacattttgaaacctttgagttggctgatactggacatagcacccatcagatttgatcattaacatctccctttagatatgtatataaaaggactaatggcagccaatcttgatataaagggaaacagtttcattaaaagctttagtactaaacctgaagaggggtataagtactaaacctgaagaggtatactagattgaacaacttagttttgaaataagccaaactaagatatgtgaaaggggaaaaaataatccttttggacgtaaaggatgaagtgatagtttacatatctgcagtctggagttgtggttctgatcacaggcactgtctctaaaatacttgcttatgacttctcagtcctgaatttctaaaagcagtggctgcatatgaggaagactggaggacagggctaacacttattgagcatgagttatgttcttggcccttgttacagattaatgcttttcttttctttttcttttttttttttctcctttttttctttttgagacagggtcttactctgtcaaccaggctggagtgcagtggtgtgatgacggctcactgtagcctcacctcctgggctcaagtgattctcccaccttagcctcccttctagctgggactacaggtgtgtgccaccacacccggctaatttttttttttgtagctcccaggagtctacgtttacaatgtaggagaactttgagtgggtaccgtagaaaacaaacaaacgtcagaaaacttgatggttgaatactgaggtgggtcttatctttgagccatatggtttggactgtttggattctgtttttccattttcttattcagactgtttaggactaatgagagaagttttgcttcctggatgagaccaagaatactgtggagagtcacatgtcactagcatttgttttcgtatctagtattatttttgaagaagagtctggaaaatgcactctggcaaaggttaccaagaatctaagcctttttgcggggggtggagggggggcgttgatatgtgcattataaattatcatctaagaaaccgtccaagaaaaatgccgcgtcgttacgtgacctcgatctttctttctcccctgcaatcctacacggcaataaaataattagtgttttagttaagtcaaatttttgaatgtctatgttaaactaagttttaggaaaaaaaattacacttattgcctccttcccagaaaacttttgaggatttcaccacagcaaggctcgtatttgctgctagtggttttgaggacctagccggctttattggcttatatttgtatttagtttgtatttaacctctagatctttgactactgtgttgtctttgactacggtttcaaaatgtatgtttttcaatgtggagcaccccattcatgcattttttcaccctgtgccttttacatttataggtgtatttgtcaaattttgcatgagaagatcacaattttagtgactcatcagttgcagtacctcaaagctgcaagtcagattctgatattgaaagatgtaagtagtttctagaggtctcccgaacttgcaagtacttgggtgtgttgaatccccttcttcttcctccatttcatgttcctttcttctcagagctgggattcatgtttttaagtattaactcaaaagacttgtagaaatgtcattattacatgctaaaccatattaccgtaaagtatgtaaaattgctacctcaaggttactacattgttaaagaaaatgatgctgttttaatttagaactttttgtttacctcttccatgacttaattcaaattgtattatttggaaattacagactctaagacctgtttgtatccctttaattgtcatgcatagtttggctaaagatcctcttctattaatagcagaaatggctgggcacagtgactcaggcctgtaatcccagcactttgggaggccgaggcaggcagatcacctgacgtcaggagttcaagaccagcctgtctaacacggtgaaaccccgtctctactaaaaatacaaaaaattagcccagcatgatggtgcacacttgtagtcccagctactcaggaggctgaggcaggggaatcacttgaacccgggaggcggaggttgtagtgagccgagatcatgccgttgcactccagcctgggctacagagtgagactctgtctcaaaaaaataaaaattaaaaaataataataatagcagcaacacagttggataactgagcaacccctagtcacagcacccactttcctggaatagccagcagttagtgtcactgcacaggaatttttgagtgcctgatatgtgtgagagctggtatagctataagtaagacaaagtccttgccatcgtcgggctgacattcttcctggagatagatgcaaggaaggaaatggaggggtggggttgcctcgctgggacttgaggtacagtgacgtgaaggtgctgaccatgcggtcacctggggagggcatctgaggcaggggactggcagtggggtcctaaagctggaagttacctggtgcatttacaggaacatcagggaggagcagagcaagccagggagagcctggagaaaggtgggctcagagcagttgtcagaggccctggaactaggacagaggctactggacagtccagagcagtggagtgacatggtttgatctgtgattttaagagatcctctttgttgttggctggaggagctacagcagaagtaatttgaagtcttagtggttcacaagacagaaataaggggttggtctagtgtgtcagtttcctagggctgccagaacaaagtgccacacattaggcagcttacaacaacagaaatgtattgtctcactgttctgaggctgcaagtccaaaatcaaggtgtccgcagggccgcgctctctgaaggcttcaggggagaatccttcctcgcctctcccactttctggggttttgctggcactcactgttgatccttggctggcagtgcagcccttcagtctctgcctctgttgtcacatggcattgtcgctgtgtctctctggctttcttcctataaggacatcagtcactggacctagggcccaccctactccagtatgacctcatcttgtcttgattgtatctgcaaaaatccagttttgaaaaaaaaggccacattcacaggtaacaggatttaggactcgaacatatctttttagggggtcatggtcaccattcaacctataagagctagcgtggccggggacatggaggttagtgagaacttctcagcccagcggtggtttcatgcagcactccttggcttgttgcctcttgcctcagtaccctggtccttaacccttctctgttccaggccctggtcaaattcctgattgtgggtctgaaacccgcttagtgtcttcaaatgttttaatgtttctcctcctgcaatttcttaataaaacgatggaaataacaaaaacgagtgttaattatattttataagatctgtgtgcaccgttctccaagggagataaatttcacattattgcaacaaacggggtatataatgatagcaaagctcttgcaagtcttgtgtgtaagcccctccttgctgcctaaagaacagtgaggaatctgtccactgaagtcccggcaagtgaattctcacccttaagaggattatcgaaggcagaactgctgcctcttcagaagtggttccgtgtgctggctcttccccactcccccaggaatagggagcctgggttcctcaaacttgaaaacaagtaatttcttatgcagagggctgagactagtgtggcaaaacctgaatgctggtacattagagtaaagtctgtgggtggtagaataatctttctccaaaacaaccatttggcgaggcgcggtggctcatgcctgtaatcccagcaatttgggaggtcagggtgtcggggggaatcacttgaggtcaggagtttgagaccaacctggccaacatggtgaaaacccatctctaccgaaaatacaaaaaaattggctgggcctggtggcgctgcctgtgatcccagctactcaggagcctgaggcaggagaatcacttgaacctgggaggcgaaggttgcagtgagccgagatcgcgccattgcactccagcctgggcaacagactgagaccctaccacacacacacaaaccatttttccactggtgggcacccaggatgaatgtgtgtccattcttgcttcttgctgtcgacccagccccttccctaacagcagacagagcacggttccccctcggaacccactctgcattgctcctcagtactcggcttctgaggaaaattgccatctcagtaccagtaggagtttccttgtgtgtcttacagatactatgtgaaaagtggtcattttatcaaactaggtgtgtcacttttacctcctgtgtggaagaagacacaatgtatcatgaagcatttttgaattctccagttatcaaactggtccaaagggcccaaggtgtcgttggattttcctcagtggacccaccttttgggggtggggaggattggggtagcagggagggtcctggccaccttcccccacctgacttgccttagccaggagctgctctcctttgatttgttttgtattctgggagtttgcctaatattttgtttgctgctgtttgaggaaatcagttgggtctcatttcatggggtacacaaatagtaaagatatttgtacattattttctatgactttgtaaggagagaaaactgtgcaaggttgtgtcccatggaatgtcgaattttcagttaggaactccctgagtctttggggcaattatttatttatttatttatttatttatttatttatttatttatgagatggagtttcgctcttgtcatccaggctggagtgcagtggcttgatctctgctcactgcaacctccgccttctgggttcaagtgattctcctgcctcagcctcccgagtagctaggattacagatgcccggctaatttttttgtatttttagtagaggtggggtttcatcatgttggccaggctagtctcgaactcctgacctcaggtgatccacctgccttggtcttccaaagtgctgggatttcaggtgtgagccactgcacctggcctgtggggcaattttagagtaaagaccgtgaaggtgcagttcatggggtctatgtccaagtctggttcccacacgcctttttccagcagggcccatggccagtggaggcttgtggagtgcttcctacctgtgcagatatgcctgttcctacctccctatcagtgttaggtttctttcctggaatatcctcctcaatttactcattccttcaattcttattgcataaggtttatcacagttttcatgttctgtaataagactaccaatacggtcaccaacatctgtgtgataataatcgccatttgtaacacactattaccattttaaaaatattcttcaggacctaacacagagtctggctgagaacagaacactcagttgtgtatcaagttgaattgtattagatttgtcaactaggattccggacctaagtataatcataacttaagatcagttactttttctggattagaattagattaggttaacattatcacctgcacatgtatctctctgaaattctttatttttattttagggtaaaatggtgcagaaggggacttacactgagttcctaaaatctggtatagattttggctcccttttaaagaaggataatgaggaaagtgaacaacctccagttccaggaactcccacactaaggaatcgtaccttctcagagtcttcggtttggtctcaacaatcttctagaccctccttgaaagatggtgctctggagagccaagatgtgagttcacctcctgttacaacatggcctggttttgttcactgttaatggccttatggatctttggtctactctgttcaaagcttcatcttttgtcccaaagtggattctgtggtttcagggctctattccatgatattggtagattaaaacggaaccaaggcaaaccaccctggttggagttatcctttgtatgtaggctggggaatgtcaaggaggtgagtagcgggtgtgtatgctggtgcaagtcctaagctgtgtgtgactcacactaatactacaattcttgaatttactgtagtgaaatcctacttagtctggtggcccccgacttctctttgcatctggaggcataatttgaagacccccttagagaaagtcctgctgtgggccacatgaaattagccacttttcctgtatgttggaatgttctgatgctgcaggtggctgatggaggtattttgccctgttgtcagatggtttatgttagttaggccagaagtagcatgtgcaaagacccaacagttcctgacacacagcagcccaacttccttctttacctttcaagaataggagctgcatcttactcaccttggtgttcccagtggccagcatagagctgctcaatacatcttcagagtatgtgaatctcatgccttctaagtcctccgggcagaaatgtaccagagctcacttaaaagcatagatattccttgccacacaaaccctgactatccaaatccaggagactgaaggattcttgcagatattcagattaggccctcacatgccaaattatcaggagtcaatttctgaaactcaggaaccaaatagattaggatcatatgctatcccttcctttccaaactctggttactgagactcactgcttgaccccagttactgtgttgagctcatgttttgaccccctgctcttttatgtttccatcttgagtgatgcagttgagagttccatatctttttgtatatgattttggaacaagtttctgtattgacacttgaatttgggtgtgctaggtaagtgctgaacatcctgatggcatccttccagcaagccacgccacaatgtccaaatgatatttccttatctctagtagaaccttgaaagtgggatggctgggtccaaggattagtgcatatagctgggtgtggtggctcatgcctgcaatcccagcgctttggaagtccgaggtgagaggatcacctgaggtcaggagttccagatcagcctggccaacatggtgaaaacctgtcttcactaaaaaatacaaaaaattagccaggcgtggtagcaggcatctgtaatccctgctactcaggaggctgaggcaggataattgcttgaacctaggaggcagaggttgcagtgagccaagatcgcgccactacactccagcctgggaaacatgagcaaaattctgagtcaaaaaaaaattaaataaataaaaaataagtggatgtatagtttggctagctatttccacacccttctccacaggagatggatcattttggacttctgcctgtttccccacagctttgtcaacagagtgcattgtcatctttgggaacagttttgtatactgttttgtctcttaccaccttttttcctctgcagacagagaatgtcccagttacactatcagaggagaaccgttctgaaggaaaagttggttttcaggcctataagaattacttcagagctggtgctcactggattgtcttcattttccttattctcctaaacactgcagctcaggtaaataatgacatttgttttgcgccctcaaaatgatatttacagtacctatgtttatgctattatgactgcatcttgcagttcacttggggtctgaattgaaatgtgctgtctttggggaacaaagtgagggctgcctactggtgttccatgtccgttacaaagacctgcgaaaaaagggtatctttcaatgattttaaaatggaatatgcattttcttgaacccttgatatctgggagtttgggcttggcacagacctgagctggaagaactatgcgagttctctgagccttttattctttctttctttctttctttctttttttttttttttttgagatggagttttgctctgttgcccaggttggagtgcagtggcgcgatcttggctcacttcaacctctgcctctggggtttaagcaattctcctgtctcagcctccggagtagctgggactacaggcacatgtgccaccatgcccagctaggctaatttttgtatttttagtagagatagggtttcactatgttggccaggctggtctcgaactcctggccttaagttgatccgcctgcctcagcctcccaaagtgctggggtttacaagcatgagccaccacgcccggctttgagggctttctttcggttgtccatgttagcgattgagagttttgagttggtaagtcatgcccaagtttgatttttgtctttgttgtttctcccctcctaggttgcctatgtgcttcaagattggtggctttcatactggtaagttatttctggtctgatgtatgaaatactccaaaatcagtaagaagactcgcttttccatagagttagagggaggtgtttgttgatccttctcttctaatcctcacttcgtttacccgaagaaaaattagagtgcttgctggtggagtgtaaactgcggtggtctccacccatgtctgatccgcggcatcatgttcacagacagtttcgggaactgaaagttgtgatttaaattgaatttttataaggtagatatacacaagactaagtgagctgagaatcattttccagcatgaagcgtttctcccaaattgtggttcatttttaaaaaaatgtatttatctaaatttcatatatagcttaatatttttttctccccatgttccatagggcaaacaaacaaagtatgctaaatgtcactgtaaatggaggaggaaatgtaaccgagaagctagatcttaactggtacttaggaatttattcaggtaaagtttaatcatttggtgtattgtatgagaggctgaggtgcttacaatgagcctgtgtgagtaactagggcttccaggagtcattcagtaatgtcttaacagatcaggagtctcagtcgaatttactctgtgaattaattagaataattattttaaaaatctactagaagagaggttgactgaagactcttaatttgctctgtactggattttgaaagttaaaccaggattgagcattcagaaaatcagccactggaaatatgtggctattgtctattctaataggttgctttagctaaatcttatatcattatacggatgggcagggggattagaaacggatctccaccctgtggttcggatggttccaattctgtctaaataaaccctggcttttattgaacttggatgaaatcctctggcagcaaggcccccaaaataaaagcattattccctcccaggtatgcaaagctcccttcagcactgctcatctcctgggcttcactaattacttaagagggaagctgagcagggaaaaatccagtgtctgggaattaggatgccttctatttcttaccttgagatcacaatgttatcgcgtccccaactgtgtgattaatttaacatttggcttgccagactaatattaacgccacactctgttttcacaagagtgcttagaatgtatgtagcattacatactgtttaaagaaaatcttcatctaaaattttaaatatttccacaggaaatgctcctacaagctttcctcagagatagagtgagttatctttgtaagaacctactcagtgaaatttggtgtttatttcatcgatcgcttgctaagaaatctaaatctgttaggtgtttaccttccaactgatggactatgtggaaactaaaggaagaaggaaatctattatgttctattatgttcgtgtaggatggcaggctaaggataatgcccgttgatggagttaggaatttgagctgctttcagaggttaaataacagtgacatgtcatctgaaagggaaatatttgttatagaagttacccccactgtatttagcattgtgaatgaagagatgttaggaaagctcttttaatttctatgtgaataatggatcctcattcatgtcttaataaaatgtatgatttattttattcatttaaaaatgtcttgtgtctatgtaaaacagtgggggattagttgcttatttagattaattatcttatgttaaaatataatttgtgttttcttgcaattcaattattcaagaggttttccacatgcaacttaatacggtatttttaaattctttaaagctacttgggcattttctacaaggaaaaggtaaatcatttctcctattccttgttaatatcacatgttggtatcaaaacataccaccttttttagattatgggacataatgtaagtaataagatttggaatatggagaagatcaactacacttcatgattatctatcctacttctgagtttttaatagaacttgcaattgaattagagcctagaatgaaattgtattatacacctgatttttcttttctgtgcagtttccattcagtgagagaaaaataaactattttaatccttctttgtcaatgtattttgtaaatacattatacttatgtagaatccagatgctttatggaataaattaagtaacatctttataaactacctggcttgctttagcaactattgaagaaaatgcagagatatgctgtgttctctaagtgatatttctttatttcaggtttaactgtagctaccgttctttttggcatagcaagatctctattggtattctacgtccttgttaactcttcacaaactttgcacaacaaaatgtttgagtcaattctgaaagctccggtattattctttgatagaaatccaataggtaagtctgacaccaagtttctcagtaagtatgtcttgttaacaacacatttaggatctgattacatttccatctttgaaaatggaagggatgctgggaagaaaatcactatgcatgttgattcattttccacaagaaacttcactgatatttttctcctaccagagaaaatctaaatatgcggggggaggggggggcatacaatcttttattccaatttatatgtgtgtggaaaaataaatgaatgttcactttgcagaatgctttaggaatccatttgctgtgaggcaagtgaagcatcctgcattccctgtaaacatgtttaaatgtagttgaatagttgctaaacattggctgtgtttacatagtgttaggttatgccatttttcagagggatctttgtaatcaggaatgctctgacgtgagacaggccgtgcatttctttctttcattgggaaacccgttcatttctggaaacacagggtttttgtacataccctgactgtgaggtttccctgaaagataatatgtggttaattaaaagccaagattgataaaatgtaaactccccttcaagaacagtttctaactctgtggttttgaagtagacttttggttctataatagagactttgttgaacctgccatatagatcttcagtagcttgtttcctaggtatacccaactatacccagtattttccaagtggttgatgcctctgcactatgcgcttcttatctgtcctgcttctgaggctagccttcctgacctgggttcctagggagaattagttgtgcctataagtccccaccctgctcagttgagtggacttgtggggaggcctgagtgacattgtgcaaatgataactgccctcatagaagcagggaggtggcctggagagaacacaggcacagctttggcctggccattgactagctttttgaccaaggccagagcacataggtgctattacacaggcaagtctccaagcagatgctgtagttcaaagtgtgaactcaagctaactacctgggttcaatcctggtgctggttactaattgttatagctgattatagttacattcatattcatgtcctagttacttaatttttctgtgtcacagttttcttatctgtaaaatagggatactattcatacccaccaaattgaaatcttatgagaattaagcatgttaatacattcctagcacatgaaactgggtgtagcaacatggtcagtgcctaacgaatgttagtgacaatgaagccatgtatctgtgaactgaatcaccttcactgtggggtggaaattactcctaccctctctgttttacatgatttttgtgaagattaaagaagactgttctggaaagcatcttgtgtagatttatttaacaaatacttttcagtccaagcactgtgcaacgtgcaaggatttgtaaactgcagagaccacacaaatatcggtctgatttcagctgttattagaaagtcattggaggacctctgcgctattacagctgtaacgttgcgccactttgccagttaatttgaaactacagtcataacatttggagcattaagtgggactgcctttctgttatcacaggcctcggaatgctcatgactaccattaaccagcctctccatgtttgagacctgtgggcttctcctcatgctgatttatttattattcagggatttgggacccagtctaaatcttggaggtgactaatcttacagcagcacctgagtgtttatcttgcttcctcctcctatatctattagcatgactttattccttcaacaaaatagaagcccaaataagtaccccaagagaggtctactttgtccaaaatgtttagaggtcatgaattatttactttttttagtggtagatgttgaaaaaatgtaaaaattaaaagttttttaatggtagaattaaaattttcatttagataaaatttttgcactttttacaatggtgaaggatacacaaaatctgtgaattacgcctcagaattcacattactgattgtatgcacttcaatagttatatatatatatatatatatatatatatatatatatatatatatataaatttatttagaaataaggtctcattctgttgactagactggagtgcagtgatgtgatcacagctcactgtagccttgacctcctgggctcaagcgatcctcctgcctcagccttccaagtagttgggaccacaggcctgtgtcaccatggccagctaatttttaaaatttattttattctattttgaagagatgggatctcactatgttacccgggctggtctcgaactcctgtgctcaagggatcttcctgcctcagtctcctcaagtgctgggattacaggcatgagccactggacccagccggctttataatataaataaaaattcccctctatgatagtgaggcaggcatgctcgatttttcagtactcttaaacatacatgttaaatatgtataagtatctggcatgatgttgtgccccctgaattgcagagtgttctttgagtggggtagaaagactgggaagcatgtctgaatacttagttattaaaagcaagctcttagaagagccccgggggagtttcctatgagctcagcatcctgatattctcccaggttttagaaaacttaggaaacggggaggacctctgctggcatgtagtttccagtaagctcaccttgggatggtgactggcacagaaactccaggtgattcacaccgggggtctggctagacgtccctcatatccccatctccagtgcccttgtgctggaatattctcagtgactctggtctgcagcatagaaatgtcttctccattattttatgtccactcccaccccagtgtgccatccccctcatcatgcttctgcccagatcctcatctgtgtggttaatgaatgggcgacccttgctggtgactcagagaaccagaccttctggaagggtccccctgactgccccactgtggtcccaagttcacttatttggatttagggagaaggggaaggtaaacctggaaggtctgtgtttcttctcagcagcgaagtttctgtttcttttttttttttttttttgagacggagtcttgctctgtcacccaggctggagtgcagtggcgtgatcttggctcactgcaagctctgcctcctgggttcatgccattctcttgcctcagcctccagagtagctgggaccacaggcacccaccaccacgcccggctaattttttgtacttttttagtagagacgggtttcaccgtgttggccaggatggtctcgatctcctgacctcgtgatctgcccgcttccacctcccaaagtggtggggattacaggcgtgagccaccgcgcccggcctgaagtttctgtttctaggaaggccacgcttctccaacatgccagatattaagttcctctccatttcgaacccacctatggttgcatgaaattcatctttgtttatataatacaatacctttttatctactggcctttcgttaacctgataaatcttaagctagcaggataaaatgtgagccaaaccagtgtgctgccttagaatgacaagagccagttctctctctctttctcttttctttcttttcttccttcctttcttttctccttccttccttccttccttcctctttcttcctttcttcctgctctgttgcccagtcgagtgcagtggcatgatctcagctcactgcaaatgtccacctcttgggttcaagcaattctcatgtgtctatctcctgagtagttggtattacaggtgtctgccaccacatccggctaattttttttttttttgtatttttagtagagacagggttttacctcctattggtactgagatagcagttttcccaagaagccaagtactgacgagcaatgtggagctgggtctgaggggcaaccatgctctgtctgctgttgggagcgggctgggcccccagcaagaatggacacacattcatccaaggtgaccaccagtggacaaatggtgactgtttgtgtgtgtgtgtgtgtgtgtgtgtgtgtgtgtgtgtgtggtagagtctcactctgtcgcccaggctggagtgcagtggcgtgatctcagctcacagcaacctccggctcccaggttcaagtgattctcctgcctcagcctcccgagtagctgggattacagtgtccaccatcacacctggctaatttttgtatttttagtagagatggggtttcatgatgttggtcaagctgatctcgaactcttgacctcaggtgatccacccatcttggcctcctaaagtgctgggattacaggcgtgagctaccgcgccctgccaagagccggttttcctttctcgtctttttatcctcctctcacccattgctagtttttattctttcctcttttgatgtaggttggtgatgggatcacgtgtgtctgttaagaagccttacattttcagctgccctcggacacctccttcatattttgattatgacctgagttgaatagggcatttgcagatattttctggtactgttcgctgcatctacctcttcctagtcagtttttgtgtgtgtcttagccctgtttccgttctgttccaatcataataaatgggtaacacaaatcctaggtcaagagtaagtcttcagaaattaagagatgatttttattttaaatgtaaatcctgttttcctggcatgggcagaattaattttgcttttgatatccagcacaagagggcagcatgatctgcagtatttcagtgatataatgtaagagcacctcattgcaaaacctggtttttaatttaaagctttcttggaaattctatttttatagcttgggtctttgtatcttgatatgtgttaatatgaaatttaaaaagtaatattgtggcgtattatgtttgaaacatgaaagtctttgtggaagatatttttctgatgttgtcctggaatacctagcatttcaaacagggtttttttggatttcctaattacaccttcttgactagtaactggaataggcagacgctgacatcttgagtggttggatgcattttaattcctgaagcatacattatgatttgcttgtatgatgtttctgttttctttgtaagcatgagtttgcagagaaagatagttacacagttagtttctttagttttcttccacgccaacagagttagcagagacattttattcttatcaggtctctacaatttcactctttgttttggagaaaagatgagcggtttgttgtcctgttttctcatgcctaattatggtgacataacatttagctaagtacactgactctaatgggtgccagataaatgtttacttgctttcaatttgttaatttggctttaagaacccaagagctggtgttggtagaagtgtttgtttactctctcagggaagtaaaagttaatattgggttacagccagtgtgttttacacaactggtttttctccagtgtgtgcgtggggagtatgtgtgtgtatgtatatttatgttcatcgatgccttcaacagtgtaacaaaaaaaccagattcatatcattcttttttctttatagattaaggtaaatgagagctaaaacactagataaaagaaaaaagaaacatattgacttcttcccatgtttcttttttttaatccagtggaagatgcttgtggtcactgaggtatggaatgcgaatgctagtactagattttaagatagacatattctcctatgttccctaatcaaaaatcgagggttgccccagtgattaagattctcagcttttagccaggcgtggttgtagtcccagcagctcgggaggctgagtcaggaggattacttgagtctgggaggtcaagactgcagtgagctgtgattgcatcactgcactccaacctgtctccaaaaaaaaaaaaagaatgattccttcccagcttgactgaatgggaagttaggatgtgcatcctacaggaattgaggggaggagggtggtagtggtttgaactattgttctgtttctgaaacctggaaagggactctggaatccactacaagttgctaaataatttgtggagaactgaaagcaacctccatgatgagctttttatatgatcagaaagactgtcttgcgatactctataaaatctgatgtccatatcccacttccttgccagaaaaaaagagtcatcaataaagaagaaacataattgtagggatacctatttatctgtttattcagttcaaatgaccactggagttggtgctaaatgtgcatttttaacaagtataatatttcagcactgtcaaaattacctctacaataataggcttgttaaattatagctctataagctagggggtaagatggctctgcccagcacacattaatctatgcctgttcacacaagtgattctgctgagcaggtagcatgtttaaacaagaaatactggtcctaaaacctctgatttatggtaggtgttgttttgacacagcaccattcagacaatttacaaggcaaagcttcgtgctaaaatatttcctcagtgtcatcattcgtcaccagtataaatattcagtagtgatgctggaaaattggtaatatgcccattgatgccaaatcactcgctatgtttcctttcaagtgagatctgttgtggatatggttaaaagaaactatgatttttcttccttgagagcagatgagctgtaagaaattgagaataacaaccgtcctgacagctttcatgtactcaatcttgcctatattgcttttaattctggcttaagtcctgcgggctttccctcccacccccttgcctgatgcgtattgtaaagaacacatttatatgtacattagttagtttaagaggctttttgtgttcaaaggaagaagttagtcatcaccagaaaagctttgttgcaaaacaaaaacacacatttcccctttcattttttcttgttaataataacaaatgcaagtgactataaagggaataacacaaaagattgcatcaatcataatgattctcaatagccacataaatattgttttttcagctttgaatgaaacagctaagagtttgaagtaggtgtggtaattaaatcctgtcgggttatcacaaattaaaaataatgtttttttcacataacaatggttatatgtacttaaactcttatcaggggtgatacgaagtcatattttatgggagttgctcctttactgctaatagtatcataaaagcctttgttaggagtttaaatagttacgtagttacatatatttgattgctattgttattttgtcagtaatctgtatgtaagcgattactgtagcacttgtctacagctggtaaatattgcatcattttggcataatttttaatctactagaatgttctgattcatggtttttctccataataaatcatacatggagatactgacaacttagtaacagagaaagcactgtgtttgtccaataaaatgttaaaaagataaaaaactagggaagaatgtgctttgttcaaagtgataatcatgtaatatttcaggaaattataagatgacattttacttaactgtgttaaattgttttcctatagtgtatataatgtgatacctgcatgtatttgtatatgcctgtatctctctctctctgtctctctcgatatatgtaagttctccacttcagtctaatgtccgtggctatggttttaacgcccccccattaactgatttgatatgtgttgtctttatctttatcttcggctaacttggaactagctaacttggaactcagggctttgtagcatatcccaatatctgctgttaatgtgtgcttagtaatttggcattagcctatgggatgtgtgactgataatagtaattcaagtattgtcatttaaaactgtcccccactgttagatcaacattatagttctctgtgaccttattgtcagaaaagaatcaaagtatcttcatgacttagttcttagctgttggataaccatttcaagggaaaatagaacactgtttctggaataacctaatgatattccattagccacttgcagtggccgatttcaacatgaataaatattgataagtatattactgagagcctaatatgtataaagcatagtttttggacactaagtggaagttgttgggatttgctagcttgaaacgctgttctgttttactgtaaggccaactgcttcccctcaaagatttgactttgaagttctcatatgagaactctggttttcatttataattggagttttaatttgagagttttccatttataactggagtttaatttgagttttatatgagaactgattttcacttataattggagttttcttattccattattttattccttccccctttattataaacatgattatttatattgccatgaagacagtggaaaaaaaatcagaatatttacaacgctgaggttgtgacattttgttttccatgaagtttaaaacatttttgcttttatcaagtttttgatagtgtttatgaaaatgatagttacattctaatttaggtaattacgtatttaccacccttgtcttatgttagccttgtttcccccttgtcttccttgccttgttttccccttgtcttcttggagcttatctgttgtttccttgctaaatcccctgagcccaggattggatacactgtatctgattagtaaatatttgttggctggacagaacaagaaatagttccaagagtgcatttgcatctctttaagcaacacccataaagaacaatgggactttacagtgttgaaataaaattagagtgttttttgtcttacagctggtacttatattaaatttaactcttgcttccaattttctttttcaaaagtacagtttgtaatagattactttggtggactttgtttctgatacgtgatggcctgaagagaaaaaccgtacattggttctttggaagctgtgattcatggaactagaccaagttctcctgttgtttaccagtcaaagaaatgaaactgtcaaacacctaataacttttttgggggtttagttgtgtgttgaaggtgacttttaacactctgtgggttaagcgtctggtactgtatagttttgtttcataaacttcatgcccttaagaagtaaagagaggaattaatccatttaaaatcatcagtagacattgaaaatctgttcttgcacagggagttgaggtgttgagatgccccaattctgctaggatcatagtttgtggtaactaagtcggtcacattacttctcttagcctcagggttctaacaggtaaaaagtggctttttcattcatcaagcatttcttggtcttctactcatcgtcagttgtggtcccaaacattgaaacaaaagtacctgttttcaagggacttgcaaacttaaatagttgccgacagtggatgatgatgatgatgatttcttctccttcttctccttctcctccttcttctccttcttctccttctccttctcctcctccttcttctccttctcctcctccttcttctccttctcctcctcctcctccttccttcttcattcttcttccttcttccttctttcctctttgttcttcttcttctttttttttttttttcttgagacagagtcttggtctgttgcctaggctggagtgcagtggtgtgatctcagctcattgcaacctccgccctctgggctcaagcaattctcttgcctcagcctaccgagtagctgggactacaggcatatgccaccacacttggctgattttgtatttttagtagagacagagtttcaccatgttggccagactggtattgaactcctgacctcaagtgatctgccttcagcctcccaaagtgctgggacaggtgtgagccaccacactagaccaacaatggattacttctaaaaaccatcctgtgtcagaatctatgatctcatatcaaaaagatgcatattaaaattaatgcagctgccaaatggaagtctagatacttttctagatacaacacacatgagcatagctccatcagatatgtcttcttcataattcattggccttgattttataaaatttccaaaaatggttcttttggcacttcaaaaccaattgtgttcaaaagaaatcataccagtgggagtagcagaggtgttcaggaaacaaaataaatgattctttatttcagatcataatctctaagcttcaagtggactcacaacaatttctagctagactcttgactgggcctagatgcttttctgagccactgggggaggtctaagtgctacagctcagcttaggaaagtgtgttggagaaaggggagggacttccagtgttgccctttacaagtacctgtacacgctttgggcttttagaagtattgataggagaaagaacataagtaatgatattttccctgtaagtaatgttatcatgaaattcaactatgattcactgagtgttctcattcttggtcaccaggattaatgtttgagaaatttcttcctcgtttaaatagaagctctttcatatctcaaataaagactcgacaagcttcaaagtacattttgaggccctggcagtggggaagggggagggagggggaggaaaaaaacaggacatttttgagaggaagtttattaaaaacaagttctctgttctggaaacattttcctttcatgtcttgtttgcatttgcattttaatagattatatcacataggcaaatgttccagcacctcttgaacacctggaaagcctgtcttagacttgttctggtgtttagaaatctttaggcagacagtgttccaaatacagtcatgctcgccaggcatggtggctcatgtcatataatcccagctacttgggaggctcaggcaggaggatcgcttgaggccaggagtttgaaagcagctcggacaatagcaagaccccatctctaaaaaaaattagctgtgcacagtggtgtgtgcctatagtaccggctcctcgtgagactgaggtgggaggattgcttgagcccaaatgttagaagctgcagtgagctatgattactgtattgcccccccaagcctaggaatcagaatgagaccctgtctctaaaactgtgcagcaacatctgagaaaacagtatatctcccctggttgatcttcagcctgatagtagctaatcagacttctctctgaacttcaggtggaagtttatagaaatgttcttttgcttcagtgactggtctcattcctcactctgattgaagcacataatagaagagttcagagattttgggagttggaggaaaaaatagcatacccagttctttctgtgttccgcacaatgatattggaacagggaatatagttgaagcagatttacccttaaatatattttctccacatacaattccacacgccttgatcagcagcagtgctttgaggcatagttacaatcatggattattttttttcattacctttacatatttaaaagtagagaaggaaggaaatggttgcttttttaaaagtagtcattatttttaatttttttttcctcctgttggtgtcagaatggcctgggcgcataaaatttatttcctttgggggaactataaatttattcttcttctctttttggagaataaaatggtagtgacatcttacaattatcccatgcgaatataaatcttctctatatactccctattacttagcatgaaaatgaaaagggagtcaagtatagtttaataagttctaccaatgaactgtattgtagacagaagtatttcttattggtgccaagttggaaaagttagtcttgacgtggtcctgtaaatgaaaggaaaatcaacacatacatttcaggatcatgagtgatcagtgtcactagaaaagtgttcttctttcactttaagattaaataaatagttgttgacataaatagccggggtaataaaagggaacacctgtgtaatccagccatcagcagttttatcgtacaatcagataagctgctgtttgttaaggaattgtcaagtctttagaccagatgaatagatttagctcatacgttagagaattttaaaaactgaacagaagaagctttaatttcccttgatgccaaatgttctaaccactctcatctcctttcacacacgagaagctgtaggagtttaaagctcaattgacctagccttcaggtatgtcttcttccattagttattgctgtaccaaagtagctaaatgttctagatgagattagggtttgaaattttatatggcaaaataagtacctcatcatttttggataaacatggggtattttttttctaatacagctcatcttttctctccctttaattctcatgtccactttcatttgatgtcaaatgagagagaactttggttgtcatttaagagcctcttgatcaaaacagttatcttaagaagcattgattgtgtgtgtgtgtgtgtgtgtgtgtgtgtgtgtgtgtgtgtgtgtgtgttgtgatgggtaggggagagggagagagagactttttagttagcttgtcccaccacaataagaattatatttttggattctcttaataatatgtgaaatttaaaatttgaaaattaatcagcaaataagatgtcctttgacttcacccaccagcaaatggaaggatttttctttattttctaataggggatttaaatcactatatgatttgggatccatggtacccttttggtaaaaagcatgactttagaatcagcctgcccaaatgtgaatctcagctcttccttgctgaattacttaaactctttctgcttcaacttatttgtagtatggcgatgatattaacagtacaatcctttttttgtgtgagtgacaattaagagaatcaatatatgaaaagcatttgatatggtacctaacagctaaaaattgatttttttgactaattgagatgatgaaattttagtagtcttaaaaaatgtacaaattccaaatttgctagttttgatgaaacaataggagtctgggaagggtgtctgtgttttcctggatgcaaagaaaaatagataaatgaccaagactaacaagccacaaaagaaaatcaatagagtattttttttgtttgtttgcatgttttctttttggttgtgttttcaatggggcttagcttcattccagagttaattttaaatttaatttggttttacaatgagagctcaattttgcatgtaagtaccaaacatctggtttactttttgtttgaaaacgatacagctgaagttgagtacagaagtctattgtgtaattaaggaaagagagtttgaaattttgtaaaataagttctatttaaatggaatattggaattattccagagaagtggatatacttcttaggagtaggagaaacttacattatttttaaaaaatgctataactagtccaaatgtataaattctatgtattcacctttttcaaaaagcatgaaaaatgacaaatttcacaagtgaaagttaaagttgacctaaggcagttttagattgttgagccttcaaattttattcatgggatgtttttagagacagtctgtggtttgatcactccagttaattctgggcaatctttctacatttctatcagatggacattctgatattttaaaacttcctcttgcgcaaaatatgtttaaagcaacctgggaagaaaatgagatttctggttagttcttgtaaactataaattatgtttttaagacatttaaaggaattataagccaaacatagataactcctgttactgcactattaccattaataaactaacaattaaaatgccgtaaagtactgactggatataatactagcattgtgatatataaaaaatagaatttggggtggagagacctaaatgaagataggacacctactaattttccacctgcttgccagatagttgtgtcttcaggcagagacacccaactagtccagagtcttaggattcaacctcagtaatgtcagaaaggccctcagctctgaactgcgatgattctctcattctgtgcaactcttttagaaataatttgataagagcttaagaaagtcaaaaataggttgtttgtaagacatcagaggatttttataatagttttgccccacccttgaatgttttagaggtctgttgtaggacagaggttttggtttctggcagttgcattctagttctctaccaaattgaggatcagccagaggtacaatacatttggaatcttgccctgtgtcttataattttatagcaacattataaatttatttgacaacttaagcttataaaacttctgtcacttccgttgtcttgtttcatctgcagtagcaacaaagcaacaagaaatctgttgcagtctctctgcctctgagcatccacacagtagatccaccctcttctttgccttcttgcccaatactcttgttattgtccctatcggtttttatgtggcaaccgcagggatgtgatgcctgtaattgaaaattaaatgattgccataaatcattaatcagactgcagattataacagcatttattaagcatcttggtaggccaggagtgtgctgggaattttgcataaggtaaccggttactgtcttgtgaattctgtctgggtattttcctgtgtttgtttcttccaacttttatttttggttcagacggtacatatgcaggtttgttacatgagtagattacatgtggtggagggtttggtatacagattattttgtcacccaggtaatgagcaaagtacctgataggtaattttttgatccttgccctcctcctaccataaagtaggtcccagaatctgttgttgttcccttctttttttttttttttttgagagagtcttgctctgtcactcaggctggagtgcagtggcgcaatcttggctcactgcaacttccgcctctggggtgtaagcaattatcctgcctcagtctcctgagtagttggaattacaagcgcatatcaccatgcccagctggttttgtatttttagtagatgtggggtttcaccatattggctaagctggtcttgaactcctgacctcaggtgatcctcctgccttggcctcccaaagtgctgggattacagccgtgagccactgtgcccggcctgttgtttccttctcagagtccacatgtactaaatgtttagctcctgtttgtaagtgaaaacatgtgatatttggttttctgtttcttgttaatttgcttgggataatggcttccagctccatccatgttgctgcaaagggcataagtttgttcttttctatggctgcgtagtattccatggtgtatatgtaccacattttctttatccaggccaccattgatgggcacctaagttgactccttgtgtttgctattgtgaatagtgctatgataaacatacaagtgcatgtgtctctttttttttttttttttggagatggggtctcctctgttgtccagtgcagtggcaagatctcagctcactgtaacctccacctcccggagtcaagtgattctcccattttagctttccaagtatctgggactacaggcatgtggtacctaatttttttttcttttttttttttttaggtagagatggggttttaccatgttacccagacaggctggttttgaactcctgggctcaagtgatctgcctgcctcagcctcccaaagtgttgtgattacaggcataagtcaccgtgtccagccatgtgtgtctttgtggtagaatgatttattttcctttgggtctatacccagtagtggattgctaggttggatggtagttttcttttaagttctttgagaagtctccagactgcttcccacaatggctgaatttccatttcctccaacagtatatatgtgttccttttctctgcaacctcaccagcatctgttattttttgactttttaataatagctcttctgactggtgtgagatgatatctcattgtggttttgatttgcatttctctgatgtttagtgatgttgagctttttttcatatgcttggtgactgtttttgtcctttgcccattttttttactggagttgtttgttttttgcttgtaaacttaagttccttatagattctgttctttttgcttaggattgctttggctctttggacgctattttttgattccatatgaatttcagtatagtttttctagttctgtgaaaaatggctttggtaggttgataggaagagcattgaatctgtaaattgctctgggcagtatggccattttgacaatattcctatccatgagcatggaatatatttccatttgtttgtgtagtctctgattttttttcagccatgttttctaattcttgatgtagagatcttttacgtctttggttacctgtgttcctaaatattttatgtttttgtggccgtggtattcttgatttggctctcagcttggatgttagtggtgtatagaaatgctactgattttatgcattgatttttgtatcccgtaactttgctgaagttgtttatcagatctgggagctgttgggcagagaatatggggttttccaggtatagaatcatgtcgtctacgaagagaggtagtttgacttgctttttcctatttggttgccttttctttctttttcttgcttgattgttctggctaggacttccagtattgaataggtgtagtgagagtaggcctccttgtcttactggttatcaaggagaatgcttccagcctttgtccctgggcattttctaaagttatgtcgcccattcctatatagtataatattttatgttatcatcatgcttcaccccctcagataagggttaagttacgtttaatatagtacttcctttccaatgaatgtggatatcttattaatcatatgtttaaaaatttgacaaatttgtgtgacctggaaaaatccatcacaaataacaggtgtcacagtgtgtatctaatggatgcgtttatctgtctgaatgtgtatgtgtgtgtgtaatgttgatataagaattccaatttgagttacatgtgtgaaactaagaaatattttaacctctgtcttcttcaccttctgaaatgtttactcagctgttacataaacttgcttttatcaattttcagaaggatttagcatttgaaaatgagttagtcccacaatgggagaaaaaagtttttactatgtagtaaatgttactgcttctgcaaactagatgatcacttttgcctgttatcatgggcatacgttttctagacttctagcagtacattggcatgactttctaaatcaagtttttataattttttaaccggtcatatgttaggagagtgctagctctgaaatttgtagtgtttggtgtcataggagatactgtggaatggtgctaccatagctattccttggcatttgtgtcctactgggagtggaaataattctgtctttggtatgaacattttttccttttttagctctccaaagtgataatggagaactttttatttatattttaataaaaaggagagaaagagggaaaggagacagagaataaactctcaaatccttccaaattagaagtcctgttaactatttcaagatgtctttggtcattctcataaattttagatttaattataaatgtatctagaacatttcatgtaggctattttggaaatgcagttgaacttttaataggactcatcattgttagactttgaatgacagaataacatggtcagaaggggcatctcaggaggttcctgttagaagaaccacagccaagtgcctttcaagcttgtggaaatcccatccagctgttctctaggcctgaaaaaatgtgggaaatcgaaagattggtgaattctcttggtggtctactcagaagaaaccatattagtaatgttgatggttcagtatcaaacctggcttgggctcagagcttgtgagcctagagtcacacatgtaccaatccaggtgagaccccagctgaaaaatttctttgccttgttttatttatatagctaggctttttagtacatggcccactttttagctacttgccctcctccacccataaatcatggtgatgagaaagacagagattcttctatcatccattttattccttgtttcttcttcttattattatatttttttggcagtaatttaagagatttgctttctttcttgtttgctgtagaagtcaaacagtatttggaaatttgcggaaaatagcgtttcataaatcttctaatttagtcttcacaaggcttgatattttatagtgagacactgatttttactcatacccttttcacaagtagtatgatgataagatctaatcctaattctagccatctatttgttctttgttctaaaacttaagtgtgtaccttagatatcactatttcttttttttctggtttactcatgatcttttgttaaatttaaaaatttttttttttatttccataggctattggggagcaggtggtatttggttacatgagtaagttctttagtggtgatttgtgagattttggtgcacccttcacccaagcaggatacactgcaccatatttgtagtcttttatccttcaccccctttccaacctttcccctcaagtccttaaagtccattgtgtcattcttatgcctttgcatccccatagcttagctcctacttatgagttgagaacatacgatgtttggttttccattcttgagttacttcacttataataatagtctccagtctcatccaggtcactgcaaatgccattaattcattcttttttatggctgagtagtattctgtcgtatctatattccacggtttctttatccacttgttgatgggcatttgggttggttccacatttttgcaattgcaaattgtgctgctataaacaggcacatgcaagtatctttttcgcgtaatgacttcctctgagtagatacccagtagtgggattgctggatcaaatggtagttctacttttagttatgtaaggaatctccacactgtcttccttagtggttgtactagtttacattcccaccagcagagatatcactatttctgttgcttcagggaaaaccagtttccagtttcctttatgtattgatggtcctctgaaaaagatagagctggacactgtggtgcacacctgtagtcccagccactcaggagactggttcaggatgatcccttgagcccaggagtttgaggccagcctggtcagcatcgtaagaccccgtctcttacgaaagagtcaatacacacaaataggtttactgaataacacagccattttctgttgagggagcaactggctccttggatgattggattagcttctctttttttggcccaaagtagaataactatggtatttttaccatttcccctcagtctcacttctaaggttcttttcaaaaatgggctaagatatgttaaggtttattaaaaacttcattgataccccccaccccccaccttgtgtaagctgcaacttagtcagagagattacatgtggagctttatatttatggtacattctttgttctctgcttttatactgcacctcagaggattcttaaattctttgacttttgaagcttttcgttttctttgctgagtttgaggacaaattttgggcaaaaacacccggatgataaataatgcatctagacaaaaagagaaacaaagtgaaactcagtgaaaagtaaatcgacctaaacagtctaagaacatttaacgttttgattacatctcatgacatttgatatcttgaccccttcagcctgtgctggctgttgcctttgcctccgacttgtaatgtcagaggattaaagctcttttactcctttctggtgaaaatatttgcaatttcagatttgtaactagtagatctgttcagctgtaaggaaacctttcagtgatgagcaacacgacttttcatctgagggatgcagagtctatgactgcccgagagattgggatcctgtagtggttttatttcattatgagcctccaccagtattatttaatgcaaccaggttttgaatgctggtgagaacacagttaaggtcatggtctgcaaggactttgatgtcgtgcagaagcctgattttcccataataggcatgaaaagcttgtgcaatatagctcttaggagatgaatatttgttcctgtaggttacaatagcagacataacctgtgagtgatggaaaatgtcgggcagaatatggatttggaggaaaaaggggaagaactagtatgaaaaaattagccatagaaatcgatagatactaggccaagaatataactgcaaacgtgtcagctgggttttcccaagaatgattgacagacactattgcagatcctgcaagtaaagaatttctgatgttttctttttttttcctttaaagttcaactaaatgatttccttatagatttgaaactcttttctccttatacagaaatttctcctctcttcttagttcccagatttttgtgctaagagaatgcataaaaggcaattattctgttgatatctttttaactatctgtaaagatatccatattgattcttagggccactaccctggtacagtttttggtggcttgaattaataggatggtttgctgtccattttatttgtgtctggagaaaactttaggttttaatgcacttgcaaattccttgggcaatctgtagcctgtttggctgtctttgttgcctttcctttagatgctatgccgagtccatgaagtgctcttctctctaaggaatacagagactggggatagtccccagagttgaggaaacgtagagccccgtaggtgtaccagttatggtgggtggtgggagtgccctgggctagcgctgaaacttcaggttttcagtggttgacatcatgagtgaggagacttttggaagaagcagaactgaaggtaagactgagtaagtggatctgtccaagagtaaggagagatgaggcctggagatggtcaaggcaacacacagaatctgactttggcagtggatcctagaccagatcagaaccagaactagagatcaggaggtcagcatggaatcagtgggaagccttccatctgcatggttgccagcttcgtgccaagggatgttctggcaattatggaagcacatattggtacaggtttgactaaccacccagacttttagcactggagtttgttgttgcttttttaaattttttcccccaggacagctgtcaatttggggagatatacaggtatgaattgcatgggaaagaaccattgaatatgactctgggatggttaaatatcttgaagctgcaaagaaggaacatagaacaaagaacaagatgaattctcatcttatgatttaaactgcatttaaacaatgtccgtagatcctgccttcctggaggtagaggccaagtagcaccatatacatatgcgtgctatttctgagcactcacggccccattgggcatgggctgtgtaggtgccaaggctggaggggctcctggggctgtgggtgttttgctcaccccctacacagcttgccctcatgcttctctgtaacagggtcaagtttctgggttacagctgccacaggaacaagctggcacattcttcttgttttgaatttgaccactgggtatttatttattttcccacctttgattgacatcaacgtttggtgacctccttcatccctcctttgggcggccaatcctgcccagccacaacactggtctcagttctcataatgatgttcccatcatgtctcttttgtaaacagagcaaatacagaaaatgccagtttctaaactttcacttaatttctacccatccactcagaaatacccactgagtcttatcttgagttaggcactgtgtttggagctaggccaagaggtcgtcaaaattgtggggaagatggatgcgcagtaagcagcagagggctgggcttgggattggctccgtggaaggagaggcccaggggccacgggagtacaggagacaagccaaccagatttgaggtggggcgagccttgaaggatctctcacggacctgtcatggggatgggtggttggggttacagcagccctggaggtaagggaaaggagctgcccagctggcgtggagtgattgcaggccaggtggtgtgagggcctgcccaggccaggttgggccatgcagggcagataaaggattttaaactttatccctagagcaggaaggctttgtcttcagtaaaatggatgcctgataacgtcacctttcggtgcttgccggagctccatttcatcagggaacctattaagagtaaaaatagggactcatttggatttttaaacttttttttttagaatcaggatctcacgatttttcccaggctggtcttgaactcctggcctcaggtgatcctactgcctgggcctcataaagtgctgagattccaggcatgagccatcgtgcctggcctgtttgtttgttttaaacatgaacttattttaatgtgtcacaaattttgtaactatctgacacttagttcacatttcaccatattgtttgtggccattttgattctttgattttcatttaattgcattgagtataatagcagcaaagtctatcttcttactgtttgttcctgttccaagcacctcccaaagaggagtaaaccaacatattttattatctctgtaatccagaaaattattgcataaggacatgtacacatttagtttggaactccagggcaaattagtatatttcctgggtttattttcttataaataatgaccaatatttcataaatattcatttaccactggtcatttaaaaagtggaattgcagtaaagttttaattggtaaagtgtaacgtgcttgtgtgtggaaaggcagcaacagacttggagacttgagcttctaaaagtttcattagtactctaagggctttatcttagggaaagaattggtcctttttctgtaaaaataaaaatgctgttcagtattggttccccccgccccaccgcccactttccccaaagaaaataaaactttgctgcttaatcagggttccagatgtctgtatgtatttatttattcagatatttatagtgttctctgtcaaacagtttgcctccctgggtgcattccagcaatgttaaaaacatacatggcaaagccacagagatcaaagacctgtgtcttgtgaaccctttgcaacatttgggccagtctctaaaatgatttatattaaaacaaccaaataagcactcttcctgtccacatcgtgctttaaggagtgttctggatggggcctgaagaacccgtgcaaattggagttcccccccatctttcgaatgagggacaccaccaggaaagcttcctgtggggctgcatttgacccgcaggtgcctctcccatttcctgtatttccacattttatttttgttttcattatttcttcctttaaaatatgggagttaacgattttacccccccttaaatattctaccatgtagaattttagactgtccattaaaaatatgggtttcattttctatattattttcaaaatatgcagtatctaccatctaaatgggaaacagcaagacttttttgtagtgacaaattaatgccactgtgactaatatctctgaaagggaagtgcctgtagcagctgaggcctgtgagctggagcaggacaaagcatagatgttgtgctctgagtaagaaagtctcaatacacgtggccttcctggtgagagctcttacttgagtgttttaaagaccagtgatctggcttagtccatcattggaaagtgttatgaaagcggccaatagacattttcctacttccactgcttgttgcagatcttctcttctggctgggagctggggtggatccggtaggggacagagcagataggtgtgtgaagtgacaaccttgaaaagaacctggccctatctacctttatgcctaccatctgtgatttgccagagttctctgcagagcaaaccatgtaaagtaaaatgttgcataaacctgctactctatccctggcccaactctgggtgtcaagaagtatgctgtgctttctgcacgaatgtgatgaatgtgggaacctttttgagatagcagcacatgctggcagtggcgagccgtgtgcgcctgggcaggctgggcgttcggcaggcatgttcccaggcacttcctagggacttgttgcatcatcaggtgtttgattctccaccccgtccttccccagcgtgtccaccacccttaggtgagagagtagaaaggagttccactcaaactaggagaattgatgtgtggctgtggaatttcctgtctttccgagttagcatgctatttgtagaggaaccttttggcttccatttgagactggatctcctttgtggaattcatccgtaactttaagagtataacttaggctcctgtcactactagttcatgctgggaataccctcagaaaggctactgtcagtccaaaccaaagttacccagatgcttctctttcttttttcaaagttgagatctggccgggtacggtggctcacgcctgtaatcttagcactttgggaggccaaggtgggtggatcacttgaggtcaggagtttgagaccagcctgggtaacatagtgagacactgtctcttcaaaaagtacaaaaattacccaggcgtggtggtgcatgcctgtagtcccagctacttgggaggctaagcccagaagacggaggttgcagtgagccgagattgcaccactatactcactttttgagacgggagtgaaaacccccgtctcaaaacactaaataaataaaataaaaataaatttgagatctttccccacaatgaaagccttgctgtcccttaaatattaataacattaattactgttctacttaattttatattaaattatatccaaaaaatcatgatttgctaacatttttaaaaactgtgttttaattttgctagatgtagtttaaaacctagattgaaatttaactagagattgaaactggaattctttcagtcctaatgactagctgtggtgtatttttaaaataatatttctatagtttatgagataagtaatagtttcatgttgctatttacaaacatatctcctacaattacatacagtaggtagtttttatgcctaatgatttaaattacataagtgaaaagtcaaactgagaatatttgtcaaaatattttctcttattaatatgggtgtttagaatgtgagcaacatctttaatataggaattatgggccaggtgcagtggcttatgcctataatcccagcacttctggaggcagagacaggtggatcgcttgagctcaggaattcaagaccagcttggtcaacatggcaagaccctgtctctacaaaaaaatacaaaaattagctgggcatgatggtatgtgcttgtagtcccagctacttgggaggctgaggtgggaggatcacttgagcccgagaggtcaaggctacagtgagctgtgattgcacagctatactccagcctggccaacagagcaagaccctctcaaaaaaaaaaaaaaaagaattatggacattattatattttacctgatcgtgaaatgtagagtgttcactgaaaactttagtttcacggaaaactttagttgagtttgcaaaattacaatttttatgcctctgtaactttttctgattttgatatcattattcacttttacgagtctaaattaaatatgagcaaaactagaaaccatttaaaatggtgggattctcaagctcgtgctggtgtctcttgcagatagctaaatggtagatgaaatagtgaatgaattgtgagtctctgatttggtctctcctacccaccatcaaggcttatccagagattttcaaatagcttttgcgtaagggagacaataattaagctaattattttccttactgccttatgaaaatataaattaaaacagatgtcacttgctgtcttccatggcatgaacctctgtggacaggagactctacactagactagtaatttagggtctgtttttccccccaagttcagacttaatcagatcagttgcagataccctgaaagtgaggccccaagctcctgggtgtcatcgctgcttggtgatcctctgggcatttggtactgccctcttgcactcctcttcccacctcccaggacccccacttcccctgagcatcatttccttctctatggctcttgtccttatttatttatttatttaaatttttttgagacagagtcttgctctgtcacccaggctggagtgcagtggtgtgatcttggctcactgcaacctccgcctcttgggttcaagtgattctcctgcctcagcctcccaagtagctgggattacaggtgtgtgccacctcctccggctagcttttgtatttttgtagagatagagttttgccctgttgtccaggctgatctcgaactcctgagctcaactgatctgcctacctcggcctctcttgttttcatttaaatggctcctgggatcacatttccttcactacatattcttagaacacttttctagaatagtctgcagcattttccttctttaaactcaagactcgcccttctccacttcccttgatcccgttatgtatttatctttacttttcattgctagaaacacatcccctggaagtatagagaatgtttgtacgtcactgtcttcttccatttagatcctctatcctctctttttaaaaaataacatatatattttttggcatttccccctcctccttttggccttcggttctcagtgtatacaagctcacagagggctaggatggttactgcctctgaatgaccattattcatgcatctgagcattggtaactgacctaggaacaatcagcttctgatgggctcctcttgaaattgtagcgcatggaaggctttagtgaatatcattgtgttgacttagccatgtcacccagtggggtggcatttcattcatattcatcatttacatcttaacctgaacgtgtttggcttgggcaggaaagtggggatcaagaatattgattgtgtaaaatatttttcagaaaggtcaattgctatggcgttttctaagggtcacccaatgctttgcagagtaaaatgcttacccacatcctcttcattctccttttcttctctgcataaggtggctcttgtgtcccttcagcacccttctctgccaccacaggcaggctcttcctttgccattcctcccctcagatgtcgctgttgttgttcttcgctttgctctccttatcctacaaggagagttctcctttgttggaggtgggaggggactctggtctccagaagtgctgttactgtctcatctctctcaccagttggtgacagaggggctaccacagcaggtacctcctctgtgacccaggcaaattgggtgctgagtgtccacgtcgagctgaatgctctgatggtgtctccaggaatggatgcatgtgatggatagactggatgctgagagaaggatggctggaaagtttttttaaaaaaatgtttttagggactgggtgtggtggctcatacctgtaatcccacctttttgggaggtcagggcaggcagatcaattgaggccaggagtttgagaccagcctggccaacatggtgaaaccccatctatactgaaaatacaaaaattagccaggtgtggtggtgcacgcctgtaatcccagctactcgggaggccgaggtgggagaattgcttgaacccaggaggcggaggttgcagtgagccgagactgtgcccctgcactccagcctgggtgacagagcaagattctgtctccaaaaaaaaaaaaaaaaaaaaaagttttaaaatcatagtaaaatgcacctaacgtaagatttgccatgttaatcattttaagtactctatatagtttggtgacgttaagtacatttgcattattgtgcagctgtcaccatcctccatctcctgaacttatccatcttcccaaactgaaacccaggacccattaaacactaactccccaccaccccttctctccaccccctggcattcacccttctactttctgtctctgagtttgactgttctacatgctggacataactggaatcaaacagtctttttccttttctgagaggcttattttatttcgtgtaatgtccttatggttcatctatgttgtagaatggcccagaatctccttccatcttaaagctgaataatattgcatggtgtgtatatacagtcagccagcctctgtatctgtgggtgctcagattcaaccaactgagaatggaaaatatttggaaaaacaatccaataaaaaattataataccacaacaaaaaaataatgtattacaaatacatagcacttacattgtatttaggcattataagtaatctagggatgatttaaaattaaatgggagggccaggcgcggtggcttacacttgtaatcccagcatttcgggaggctgaggtgggtggatcaacttgaggccaggagttcgagaccagcctgaccaacatggtgaaaccctgtctctactaaaaatacaaaaattagccgggcttggcagtgcatgcctataattccagctactcgagaggctgaggcaggagaatcacttgaacccaggaggcggaagttgcagtgagccgagatcacgccactacactccagtcttggcgacacagtgagactctgtctcaaaaagtaaacaaataaaaaataaaattatattggaggatgtctgtatgttatatgcaaatggacttgagcatttgcagatattggtattggtgggaggtcctggaaccaatcccacacagatagagagggacaaccaactgtaccatctttcgtttatccattcatttgttattgatgtcttgggttgcttctgcgctttgactattgtgcatagtgctgctgtgaacatgagtgtgcgcatatctcttttagacccccgtagtctcttctgttgtgtatatatgtagaggtggaattgctggatcatgcggtaattgtgtgtttcataatttggggacctgtcatattttttttttcattgcacctggaccatttttatgatcccccaactatatacaagaattctaattccttcacatccctgccaacacttggtattttctggttttatgatagtagccatgctcctgggtgtaaggtagtgacttcctttattttcttaaatcaatgaatcctacaaggcagctttgagttgttaattgtggggagtgccaggtcgcctgacatctttgggcaactctttttcttttctcttctttttttttgagacagtcttgctctgttgcccaggcaggagtgcagtggtgcgatctcggctcactgtagcctccgcctctggggttcaggcaattcttctgcctcagcctcccgaatagctgggattatagtcgtgcaccaccaagcccagctaattttttatatttttagtagagacggggtttcaccatgttggccaggctgctctcaaattcctgacgtcaggtgatctgcccacctcagcctccaaaagtgttaggattacaggcgtgagccactgcgcctggctgggcaactcttccctgaaaacaaggcgcccatgtgatggagcctgtgcgggtttttgttgtgcgtcccctcttgtcgcctttccttggcatgcttcccctttttttaatcctacacttgaaaattagatcaaacacaaactgtgtttagatttatttacagtttcttaactcctttcctgtttgccttttgacaggcttggcataagaagtctttttcaagtagtaaattaatttaggtggcacgcaccccacctgagttttgttacatgctggcagtttagataaatggatattataatctcagcacatttctgcccaacaccactgcacagatttgcaagagtctacaaaagtgataatattctgtcagtttggagcctagaaaaagaagaagaaggagaaaaaaaagcattttcttgttcgtatttctaggatgcctgtggggaagccggaaatgccatatagcagtttacatggctaaatacacatgaaaaaagataagggacccaaagatgtttctttgtaggcacacgggagaagagtcagttcaaattggtaattgtcagctgtgtttggagatacattctccatcgcaaccaaagatttttctttttcccccttaaactcaccatttccttgaagaatgcagtctatttttaatgactttattgatttgacgattgggttacaatgtactttatttactgcagaaatgtttcgttcctgtcagcacttaatgcgaataaatctactttttggcaccactttgatagactgtaaaactgcttatatttgcaggaaaatttgttttgccacggtatgtttatgtcagactcagtgtgactttttctcccctcaaaatcattttatatcatagtgtagctgacaaataaatacacacagtgcagtaatcattgtgtactgtcagagcagcagaaaacaaaatgtgggttttatgacagggatcaaaaaagagatttaatattcacaattaaagccacttatttaatgctttctgtttttgcttctgtattaaggctttccagtttttggttcatagtttgtatatctcttaaaaatagtaaatatacagtaaaccctacattcactgatattgtctgcatgtgaatttaatatttattatccaagaagacccaataaaagtcgatctttatttcctattgttcaaggtataagcaaagtcaaaatacatttgcaatacgataagttttctgttaagtttctttcttttcttttttttttttttttaagatggagttttgctcttgttgcccaggctggagtgcaatggtgtgatctcggctcactgcaacctccactccccaggttcaagcgattcttctgcctcagcctcccaagtagctgggattattggcgtgtgccactgcactcaaataagttttgtatttttagtggagagagggtttcaccacgttggccaggctggtctccaactcctgacctcaggtgatccacccgccttggcctcgcaaagtgctggaattacaggtgtgagccactgcgcctggcctgttttctgttaagattcttaagtttttcttgaaagcaatgtcatgtaatatatagctttgctctattataataaatttaatttgggaaggaagctgaatcatctttaaaaattttttttcatgaaacatttttcttctacaaatgttttctagtacgtattttttcttaaataagagaaatactatccattttagttatattatacatttttgttttacttatttttcataggatagcaggatataatattggcaaattgaatatcatcaaatagcctacaaccttagtcctgaatcagtactatgccacaagagaatttggaatatccacaacatgtccattatatttgcagtccatctgaaaaaataatacacaaagaccaacaaatggataacttcctgtacaaatgaacacatcagaaatatcattatgtttattgctttagctacctttatgctttaatatgattggcaattatccagtaaacttgtgccaggtaaaaataagcacccatctgggttattcaatttcaatgaacatgtaaaataatattttaataattacgcaatatttgtttttttaaatttacttttgaatgcatttaacaaactggctaggagtcctttaaagagaggtaaatgcaatcgtcaacagcatctgcaagctaaccccaaagaacccattttcagccaacttcgtgatctctcattcagattcaaatctacaatgaagtgccaaaatcatgcttttaaaaaatgacagcattagtgaaactttggaggtgcttatattgctagtgtaggcaaaaacgcacagcaatacagagctaggccgttttccttgattctttcaccataggaagaaatgaacttccagggaggtaatggagtccttctgagaaccatgattaaaagtctttgggaattatcagccaaacttaaaatggatctctaggttttcatggggagttgtgttaaaaagggactttttaatttaaaggaaccaagttgataaggtaggttcagggaaccaaaaatgttgaacagatttttgctggattgacaacttgtacggatggtgggtttttagggtggttaatcgtctgcgtctagggaaatggccacagcttgcctctccttcggggtgaaaggtaggttctgagtctgtgatttttccctgctcagagtgaataaatattgtaagtaggtgtggtcagctgtccagctctttactttttcagttgggaaggaaagagttgcacagctatgatgttcagagccaacaaggacttgcagacgccctgtgcataggagcagctgaacacattcagaatcatgtaattgagcaggctgctaagtaatggagaaaagaatatcatgcacagagatttgatgtctttttatgggagaacaaaagagtttcgattctttcacattgagtttagcctagccattgtgtggcacaggaggtttaatgaatcattgtttaactaggatcctgccaagtatttgaccattaaatagactccaatgtgtatagagttcttctctgacagactcttatttgactgtgattaattggcatcgaattgttatttaattacctccacagaaatctaagaacagtgtgtattctgattaagttatttgatgtaggaacaggcatggggctggagaggtcagctcagccctcaggactccctgctactaccaaggccaacttctgtggctgcccaaagctcacagaagatccctgaggatcaaaaattcagacagaatctggattttacctttttcttagaatataaaaaatgttttggcaactcatagcataaatttgtaaagctttttttttgcatgttgaaatcctttgaagttatttattggactgtgttaaacatgttcagtgacagttattgaggtttccttcagttcacaattgaaacatgttacgcattcccatacatggagaagaggtcagccagcaggatgcatggcacagtaggagtaaggcagaagaaagtcaatgattgcacagtctggtttgggagtcactatccttagagaatggcaccacaagggcatgagatcaccactgaggggatagagttctgagaggtggagcctctagatgcaaggggagaccacctgtgcttagcagatgggcagggtagcaggagtggaaagaggcagatattaaaagaaagaaaatcaggccaggcacggtggctcacacctgtaatcccagcactttgggaggccaaagcgggtggatcacttgaggccaggagttcgagaccagcctggccaacatggagaaacctcgtctctaaaaatacaaaaattagctgggcatggtggcacacacctgccagctacttgagaggctgaggcaggagaatcgcttgaacccaggaggcggaggttgcagtgagccaagatcgggctactgcactccagcctgggcaacagagagagactctgtctcaaaaaataaaataaaataaatttatatccctgaagccagcatacataaatatctcgaaaagacgatgatgaacagcatcagatgctgcaggaaaagtcaagagcaatgaggatgagggaaaagctggctgctgcgtttagaaatgactggtgaacgccatggtgtgaagaggagcaggaatgggactgcagagggttgtggggcgtttggataggtgaacattccccctaagatgaagatgatggtttgactaagaggtaatgtgtatcttaaactgtttataactgacagcttaggtagaattataagaatcatagtaatatttctagttcttaaaattttatctgaatttttaaagaagaaattcaatggttaaatttcccccctagctttttaatggtgtacttaaatatatatatatatttggtgtacttaaatatatataaatatatatatttggtgtacttaaatatatataaatatatatggtgtacttaaatatatataaatatatatatttggtgtacttaaatatatatatattttggaatatatatatatatatatatatatatatatatattccaaaaaaagttcatgcatttttattgaacacaacctagcacacagtttggtgtaacacctgttggcggttcccagatattaaaatgatgcgccggggatggaactgacgatcacatttgggtgttggttgatctgtttccagcacacctttggttgctttacatagggtgggtagtgggagggcccattgtcttcaagttcagtcacgttctcacactgaatgttttgctgtcctatttttgagtattacatatacttgtatgtggattagagatagagccgattttgcacactgactggtaatttccattcaaggtaatctcagtgattgaatttgatagttgcctttgtggaagtggaaattccttgtctaggtgaatgctgtataaatatgcgttgctgccaccatctctgtgggaacacattcttgtagaccgcttggtatgtctaggcccttgtttttacccctccaatagtcattcttttggagatattccatgagcatttagccgcaaacgacagtgacaggatactggagcagtaaaaactatgtcttagggattaaagtggtacattcccagaagaggtcaagagattggtgatttcttactctcttagaatcagaggttcttaatgagagctctgctgtcctgtggttcctggtttaggaatcccctgaaatcatatgcaaactgtacacatgtgcatttccaagcgaaaacactctgtggcattcattggccatgcagtgtttgagagcagtcgtcctagagattctacctgttgctgtccagggatctgtaccttctggatgctacgtgaggctgggccaggttcactcctccctggtgtattcttgagatccatgggtaaaggaaatggcctggtctgtcttcctaacttttttctttttagcaaatgtaaaataatcatcacttgctgtagcaaagcatgcatagctgctatagcaaaatggtttcccgaggcaatttatcaggtgttttcaatggcttcaaggataatcccctacaatacttcctggcaatgagtgattcggctttgccctgggtcacacagcatgttaaggtctgggatgaggtagaactggagcccctggactttcctaattaattctgccttttattaggctgcatgtcctcattcattcattcattcattcattcatttatttacttgttacaagttatggcctcctgtaacttgcgtaatttaatcctgaggtggagttattttaaatgttttactttaattatgattagccaagagagagttcctgaaacccttctaagcaggagtgatagccaaagtatttaccatccagtacagcaggcagtagcctatcagaagaggcctgggctgtcagcggctgctttggccatcgtcatttgtgtcagccctgcctggaaatttattggctaatttttattagtagacatttaatagaacttgcaaatgtgtccagtaaagtagcttgatgtcatggaggtgttgacatgagcacacctttctgaacctccaggagctgggtatgagtcacagcctggatgcctgacagccaggcatcctggaattaatttcttactgtctctgagcctccactgtatcttctgtaaaatgggaacagtatctgtgtcatagttttgaggtgctgtatgtggtttctggcactaatttagtgctctgtggggtggtcttcaaacacagtgttgagttcactcttctaggtttgtgtgcctcatttggtgccttaagaaaatggtctgggttaggatgtacctttatattattattatttttttattttattttattttttttttgagatcaagtctcactctgtcacccagcctggagtacagtggtgtgatttcggctcactgcagcttccgcctcccaggttcaggcaattctgcctcagcctcacgagtagccgggactacaggcacacaccaccatgtctggctttttttttttttttttttttcgtttttagtagagacagggtttcaccatgttggccaggtgggtctcgaattcctggcctcaggtgatccccccacctctgcctcccaaagtgctggaattacaggcatgagccactgtgcccagcctttttttttttttttttttttttaagaaagggggcatttcttgctcccttgcccagtctggagtgcattagcgtgatcatagctcactgcatcatcaaactcctgggctcaaacagtcctctccccttggtttctccaagtgctgggattgcaggcttgagccaccatgcctggcagcagtgggatgacatctccaatcatgagtgaatgaaccaagatgaccctcaggaaaaaatcttgtccagttgcctgctctcagtgaggaaggcaccgggatgagttagtgtgggctctgtctgtgcacacacaggcagaagccgagtcaatctcttggctatcttctgtggactactttctccagccaaagtcaaatgtgtaaaacgtccatctctccaaactgcacttgtgcccctcctaaatgcttcctctttacaaatatggctttgaagagccataagtacaaggaatttttagcagaggccctcaacacctgatccttttccactcccattccacacccaagtcctctcctatcagcacaccttaggtcatgctcttcccatcaactaggcaaatatttgtcatcccgtcaccctttcctgcctctcagtcctgatggatgtcattccttccacctgatcaaagtccacattcttcatcaatacattctcttccctctttccaaattctcaggccctgttcccatgagggctgaccccgcctcaccctggtaacccgcaccagctggtgatgcccccctgctgttgtgccttcctcattgccgcctgccttgggcatggtccgtgctttcttatttctgccacctgcgtgtgtgctcatgtcgggttgtgtcactctacatgctgtgctcacttacatgtatctattaacctgctaccagtgtgatcataagacactcagagagggctgggtgtggtggctcatgcctgtaatcccagcactttggaggctgaggtgggcaggtcacctgaggtcaggagtttgagaccagcccagccaacatggtgaaaccccgtctctactaaaaatacaaaaatttgctgggtgtggcggtgcacgtctgtattcccagctacttgagaggctgagcgggagaattgcttggatctgggaagtggaggttgcggtgagccgagatcgtgctagtgtgcttcagcctgggcaacagagtgagacttcgtcccccgcaaaaaaacaaaaaacactccagagcgacatcaaacaagcatcaattttaagtcatgaaacaagtaaaattttaattccaattagcaggttctgatgagtgattataggtgtcttacctgatgggtgagcagcaggaaaggaatgagtccaaagtaggagattattgttacccagaggaaggaaaacttgaagctggatgtggaaaacagatgatgaggttgccttttgccttgaagccatttgggtttttataagtcacttagtgtagacagtctcacctagcatcttccagttggggaaaaaaatgagaaggatctgattagaaaatggaagaacacatacatacttttgaaactcattttctccaatttgtcatgtcatgtaataaaacctggaaattactttttcaaaaatatgtcataattatatgaaaaggcaagaaacaactacactttgaaaacacaacacagtcctgggactacaggcatgtgcctccatgcccggctaagttttgtatttttggtagagtcggggttagcttccctagctgcggagggtttctgagaaaagcagcacagttatccgtagccggtccagtataaaggcactcgcattagtggcaggttcctgagagctacatttgtcagcaagagtttcatggaggagaaagggcgaaggctgagatcctggtaggtggaggcaagcagggactgaggaccttcatgacaggtggatggaagagagggaaggccccctgatgggaacagggacacacggccaggaggaatggaggggaggttaggaagagacctctcttctacctcttctttcctcactgtttctaaaaacttaatagctttgatttgacagatgaataaataaggatgtaaatgaggttattttaaatgaaaagtaaagacatgctggtaattatgtaaaataaagataagtcaaaaattacttacaagttttcatgctgtatgtttaggcatagatctaaggtagggtttgagaagttaggcgtgggttgttgtgggtcaatttcaaaggattctgtttagtttatttagatacgcgtaagatgttttgtaggataactgagtgtctgagtaagccctgggctgggagatcaggagtacagataagatttgggatgtataagcaaacaggaaatctttgaaatgaaagtgagcaaagttcgagaagagaatcagaaaaaggaaaaaatggtcaacagatttatccttagaaaaaaataagatgaagcaaaggatattgaaggaagttgccctgaagagtggggtttctcattcctcttctctctgccttatggaaatcccagaatggcttggcagagagttcccaccgcattagaaaacactgcatcaccttgagcaagattggcttttgtcttcacatctctaacatgaggagtttggtctacaaagtgctgtgaacatttctgttgcctgcagaaacctttcttcagaggcaatctctatgtgaaggtcccaatggatgtaaggccctatgtttgagaggggaagggcagagaagggaggagatgaggtgtctggggttgggtgtgcttggcctcctcttcatcctctgtctcattctttaagattcttcaaggcagtctcagaatcttcataagacaaggtttgaggctgggcgctgtgactcatgcctgtattcccagcactttgggaggcagaggtgagcagattgcttgagcctcaagagtttgagaccaacctgggcaacatggcaaaacctcatctctacaaaaaaatttaaaaattagccaggcatggtggtgcaccagaggtcccagctacttgggaggctgaggcaggaggatcagttgagcccagggaggtcaaggctccagtgagccttgacctgggcaacagagtgagaccttttctcaaaaaaaaaaaaacaaaaaaaaaccccataaagtttgaatgttatcagccctggggatccttcgcacccatttaagctctataatcctacaataataatacaaagaatgtctcacccatgtgagctactctagaatttagaagatcccttcataatcatgatctctttgatcctcatgatctttggccctgtgaagtagtccaggcaaatatcatcagctccattttataggtcaggaatttgagtgtcagtataggttgggtgagttgccctgtattgttgagtcctgttgctactgagcctccgaggaggataagtacctcatgtcttgtccctgcctcattttctctttcatgccttctgtgagcctctgccatgttgatggcctgttctgatgagatatactgaaatactggacttctagatctcctgtttggttctcattttggtctaagctgagtgatacaggatgtccaggctggcccatcccctcaaatggcttcctcccctcccagatcacagtgtcatagatgctgtcatccttttcagcccagcaactgtctccaggctccacccaacagcctgtactctggaccagtctgtgccccgccatgtggcaccacattgtacctggagtgcacaggtcaattctctcgacaccatttgatagactctgctctttgggacagactgcttgcatttacattctacttctcacatctcaagatagtggttcccccatcctacctttgccctttgcacactccacctaccatcaactatgggtacctgagggtccaccctctctctgtacttctggcttccaattctctgcaggaatatctaaggccaattcttttttttttttttttttttttgacggagtctcgttctgtcgcccagcctggagtgcagtagcatccatcatcttggctcacggcaacctccgcctcccaagctcaagcaattctctgcctcagcttcccatgtacctgggattaaaggcgcccaccaccacgcccacctaagtattttgtagttttagtagagacagggtttcaccatcttggccaggccggtcttgaactcctgacctcgtgacccacctgcctcagcctcccaaagtgctgggattataggcatgagccaccgcgcctggctcaaaggccaattcttatcaaaagtattagttttcagaaccatcagtgaagctataagtgtggatacctataaagaagtttacaaaattgaagagttcactaaacacatctacttttaccttcaaggtcagatgtggcatgacctaagaccatttttgtggtacagaatgggcttaccaggaaggaatgagtggcacatgctacatcatgggtgaacctcaaaatcttgagatacgggaaggaagccagacacaagagatcacatattgtgtgattccttttccatgaaagatactgaaaaagcaaagaggcagaaagtagttgcttgaggctggggtgggcatagggaggcactgtgagtgccatgagggatcttagtgggggcataaaaatgtcttgaaacttatttttggtaatgactgcatcactcagtaaagttactaaaattcattgaattggatacctgaaatggatgagttttatgagacgtaaaatatgtatcaatgcaaatatgcctcaatattttcatatttaagtgtacttttttgttacaaaaaagaatggggctcacagtagacatgggaacttacaagttttaaattgtagtacggttataagggaattgggaagtcttcgtcatgggagacgtatcagaattccggaggtgactttaacttcagattagattctagaatcagtttgtaaaatagagtcatttatgaatttgtattttgacaaaaagttcattaacaccttttataatattctatgttgtggaaaaaagttaggagcaacctgactctgtatgtgatattatgacttcaaaggagcttggtttctctctctctctctctcagaggaaaattttagtgtgctcataacttaatatagacccttttcagacatttcggttgtttcctgcttctgatttaccaaataatgccacattgaccatctttgatgcacttattaatgccttgagatacttcttataaaattgaattttggggtccgtggggatgcactcaatagttgtttattgtccagctcccaaaaatctacctgtgccatcatgcaggattggagtgatgtggatttacattaaatgtgagtccaaaatgtggtctggctcaaagaatttactgtgattgtgggcttagtcatgggatatatcctgaccctgagatatgcagataatacctagggtatttattttaatcctggctaccaggcattcagagaggctggctacctgactatgtgctgaggcaatggccaacatgggaccctgtgtgttatgagagataattgaggtacccaagggataggtgcctgtgagaagtctggaaaacttgtgattaactttcttcaagtagttgaagagctgccctgtcaagagaaattcgattcactttgtatggttgtaagggcagaatcagcagcaacgattggatgttcccggaaggcaagattcggtttaatgtaagcaagccttgtctaacagaacagtccgaaaatagattgggtctcctcaggaaacagtgactcctcttctctcgacatccctggagatgctccagcaggggccagatgtcatttggatgaagaggtgtggcatgtgcatggagggaatttatcataagtgtttgatttggagacctctgggaaaatgactgtgagactgtgaacttgacatcacagctctgattatgacagtttactgcgaagccagatgaaaatattctggccgggtgctatggctcacacctgtaatcccagcactttgggaggctgaggtgggtggatcacctgaggtcagaagcttgagaccagcctgaccaacgtggtgaaaccccgtctctactaaaaatacagaaattagctggtcatggtggcatgtgcctgtaatctcagctacgcgggaggctgaggcaggagaatcacttgaacccaggagacagaggttgcagtgagctgagatctcctccagcctgggcaacagagtgagactccatctcaaaaaaaaaaaaaattaaaacttttattctttttgcaaacaccagtctttgaattgtttcttagaacaaggaagtaactattgaaccttctaatcttatactttctacactgagatcattgttgataagagttttgatttcagctgatctttgacattcagttcagttattggcgtagctgtgtgaggaggtgggctttctcagttgtttttgttttccttgtattttatgctgttttccaaccatgggtctttcagattttaagatgctcccaaatggtcaagataaagggttggttttcacatactaatgatttatgtagcctttttatctttttttcttcttttcttttttgtagagatgaggtctcgctatgttgctcaggctggtcttgaactcttgagctcaagcaatgctcccacctctgccttcagaagtactgggattataggtgtgagccccatacctggcctatcttttttttttttttaatttgaatattgctttcaactttttaaaagctgaaccatacttgcaatgtttctgaatattgcctatgttaacttttccacttaagaaataattcatattttaataattatgtcttaaattttttaacttatattttccttttattggtattgatacactgagatgagaaaaaataacaagaaggacgacaaacaaaatccataagtatctgtcggaaaaatactcatttaattttaatgtttcttaagtatagctgataaaataatagcctgacctcttgccctgcatagcatggtctggcaaacagcagaagggcccccggaagctggttggaaattcaggctccagctcctccccagggccactgcatcaggacctgcatttgaaaagttgagcttcctccccggtggcatgctgcagaacctgtgggtcatagtcatcatcgcacctttttggttttggttttctagcagccatgaaaaagtacctggcgttgtgcctgggcttttttttttttttttaacaggcatgagcccgtttaatccctaggacaaccctctagaggaggtgttattagaggctcagaaaagttgtcactgggcctgccaaaggtgtcactgaatgatgctttctggagtctgtgtgtccgaagcctgagacaagaaaattgaggtgcagctccaacttgtacacactgtgcttcttggccagctggatgcctcaggagaactgcagaggctgcattagccccagcagcgggaggcagctccgtctacagcctctgaccattcatggtccacttgcagcctggtataaaggccccaggacgaagtcaatcctgacaaaccctaggaggccacacatctcatctgtaagcagggcttccggaagcgttgattagaaaagaagttcagaggcctagacacacacacttctcaggggtcacctgcatccacgtaggctatgtgtgtatagcttccatttttttgaaggaaatcatttgaaagaatagatatttattagaaaccaggtttgatctgtttgtgatgcctttatgacatactgttttcttggattctacttgacgggaaataaagtcgatgctaagcagtgatcttcagtcattaaataatatttctgttttcctgcataatttcctcttgtgttcttagataagactaagcctgtttttgtcatactgtttgcacatctgaaaatgacaacttgtttgccagtagtaaactcacagcctggaaaatgataggatcccaagtttccccaaaaatgtgaggtacagtcaagcaggctggggaaaaaaaaatacagaggttatcattatgtttatataaaaaatataccacttagcaaaagaaattctgataaagcaaaattagtgaaataattaggatcaatttctgtacgttcatctacctactttgcacttggatggaagtcctagattgggtcttaaaaggagggaacattctagaacccaccaacccttcctgatactgtcacaagatttttttcccttaattcttttaaaatcagggccacatttcaactccctgcccgctgccatttgatgatatttttgtttctctttaggtatcgtcctattttctttttctttaccactgacatcggcttatttcatatgaataatatattaaatacatatgcatttaaaatattgttttgatttgtttgcgaattgtttctcttaaagggtctatctggggaaatgagtaatttttcatatcctgttcttgcaggaagaattttaaatcgtttctccaaagacattggacacttggatgatttgctgccgctgacgtttttagatttcatccaggtaacgttgagagtaatgtcaggatctcaaatggaaaacggaagttcctattttttcaagcccttttcatggggtctgggggtgggactctcggcctggctgtgtgtaatgttaacttaataaagggccatgtttgtaaaagaaaggtgcggttataactcagaggctaagttggcatgagtaataccttgtgtgtgggagtggctatacagtcgcgtcagggttagtttgaagcagcttcgtgcttggtaagtggctctccgtctgcctctaggtatctggcgtggattttgctttactgtgaacacatttcataatacagaaacaatcacctctcacggaaagatagcctagattaactaaattatgcattgtattaccacaaagggcaaatacttaggcactttttttttttttttggatagaaccaggtgtggttacttacaaagaaaagattagtaataataaggtgaaaataatactttattaacaaggacaatagagagcagttattgcggatacaaagcctttaaaggcaaggatatctaagccaatttgagtacaggatcaaagtcaactcagaaaatgtcttttttgttttcacacgttgattgctctaagtcttaagctgtctttaaaaaaaaaaaaaccaacaatcctacagaaataccttctgtaaaacttttcttttgtttgtgaacttgaggctctaaaaaataatattgggtcatctctcatctccttattcagtactgttgctcatgtggtttggttttattttattttttcctattgtttaattttgtctacttgtcagtggttcaagctggggcactttttttttcccaagtgtttattttggaaatgcatctattaaaagctatacatattccaaaatctcagctgctgttgctaacactttatgaaatttgaacctctgtgactttttctaagtgccaacttagaatagttgtaatcattagctgaatttaaagccattaaatagaaatactacagttggggtctgcaattttggcttgatcctgtgatccccctacccctgcttttttctcaatgctcagatgctttagatctcctctggagccacagttataaaggaagcaaaattacttaatttggaaaattagctatgtaagaaaaatcagtcataggcttgaaatgcttataggaattcctgtttgtcacacagcaaggcagcaaatgagcatgtgactgcaaacagtatagcccatgggcgaaggcatccactgtttatggaggtgaagtaagctgagactcacaggtggattatttttactgcaaacaaggacctctgatttttttttttcttttgcaaacatttttaaaatgtgccctcctgggtttagctatattatttatccctcagaagccatcactaaaacagttgccccgtttacatagaatgcagattattgtctgtacacgttttgacagggattgttaattacttcaagaagattttgtgaaagtttctgtttctttgcaacaggaagctaggcaaaggttgagtttccgaagctggctggcccactatgtgcttagcagagtgagcggtcgtaattagtatcccttatgtgctttgtctcacatatggagggagagggatggatgctacttgatgtcaatataaaacatttcttagaagcatgaggagggaaaattctagtctcgttgtacttctatttaaccagagagacaagggcgtttgttattatccactcacataatcttggtaaacttaatgttgtggaatcctactggccccaattagctgatttcttgaatctacagcgaaggttaaatcctaatgttattgtctccaagaaaggagttttatctaaaggataacttagttatcaattatgataaagatctattgtcacttgttttgtttgcaggtgtctttaataaggcttcccataatcccttcaggaagaaatattttctccttttaaaaatagtattagctaaatataaaagctctggtccctgccattgttgttgattctttgagggacatttcccaacattcattgtttaaatggttgtcaggaagaatcaagtgaaacgtggtaaacaatgcagtaactggttcatcttactttgtgtgccgagcctttctcccggggatttgcattcgatgagtgggcttttgactgaggtatcgccaggatcattttgaagtatttgggcctgttgctatattaggaagtgaaaatttttattaaagccacccacccaaaaaaatgcatttaacctgccctcaaataaaggccaacaaaaatctaaatgtaaattttttttttttttttaagttgcctaggcctctctgtaaggatgaaaacagcccagtgctgttctgggactcttaatggaatcatgtaaacttaaaataaacactattatggtaagcacatagaatgaaaactaattttccaaatcaaatacattatattcaattcattttccccaatcaaccaaatgtttaaaacctgttagttataacagcaatcttctggaaattaattagaagcctattagctctgctagctgagccgaatgaagggggttgctcggtacatttctaagtagtctcctgaattaaagcaaagcaaggtcaaaatgacagttagctttgttcacctcatggctttgcttaaagtcgttgatcttttaggggggaaggagggaggtgttttgttttgcaaaggaaattttgtctactttgactcagttctgtgatacatttttaaaatttatttctagagccagtggggtgagccatacaggaagcctgatgttatctgtgtggatagtagccttctccattgcatgggcatctgaaatggagttgaattttaggcctcgtctaccgcatcaattcttctacagggtttatttagcccctttcaaaattcagatagtaggaaatttcctggatgactttgtgtttaacatccttagcaaaacatgcttcggacactggggccctgggttttgtggctgtcatcaggttctatgggtaataaacatgctgctgacatcacgggccctgggttttgatggctctcgttaggttcaataggtaataatcacagtgactagcagttcctcctaagcccagagaaactcacagaaagtgaggccttctcaacccagcagctgagattgactgaaacaattgagtttaaaaaaactggaaatttctttgtcaagatgttacccttggtgttatctagctgactgatcgacaggggaactacgtatcatcagaaccaactacggatggtattcttgagccagaaagaactttggcaggatgtatagtaacaaatagaatgaagattaaaatccacagaaaagttaggtatcttcataaaaagggagttgaaattctacacttaccagaacattcagactaagactgtcgagttgttattcttactaaagctgagatttaaaatcaaatagctatagaaataaataatgtagttgcatttatccatgtgactttctttttttttttttgagatggtctcactctgttacccaggctggagtgcaatggtgcgatctcagctcactgcaacctttgccccccaggttcaaacgattttcatgcctcagcctcctgagtagctgtgattacagatgaccaccaccactctaagctaatttttgtatttttagtagagacagggttttgccatgttgctcaggctggtctcgaactcctaacctcaggtgatccacccacctcggcctcccaaagtggtgggattacaggcatgagccactgcacctggcctcatgtgacctttttaatccagagcattcatgtttgattacgttttctgtatgatggtgatcgttttattggttttgtaagtaggagtctggaactgtggaccattgggtcagaactgaactgtttccaattgagtttgccaaagactggaggggtagatctgagaggagaaccctctgcttgtggcttggtgtctagaatgtaggctctgtagaagcaagtctgaaaccatgcacagattttattactctcccgatgaaatcgctgagataaggaaattctggtttacatgtgaccagatttgctggccagatagaggcaattaacctaactttgatttttggacttcaataaaatatttgtatttgtgagttttcatttgtttttatatagttagatgttggcactcattgcagatgggaacagtgacactggtaacttaaaagtgggtgtcatttgctgtcctgtattaagggaagaaacccagaggggcagcgagggtaatgtgtcactttggaactcagattggctcaggtgtgcaacagtagtgaataaagaaaggtgaggtttttgattaggccttttggaaggaaagccagaattaagggaagtttttgaatatatcataagatataaatatatcactggaaataaataacttatagaatacaaatgaacagtctgcaagttacctcaaggttgccatgggctaatcagataatttagccaaggctggcagtgcacatctggcttataaagagttgttcaaacatgtttttcttgtctgctttttcaaaacttgtaacagctttgaacatctacaatatttctaaagccaagtcatttatgaacatagaatggctcttcacaggttaaaagtgaatatcttgttttcataaagaattgaaatacaaatagcataaagatcttcatctggaacttatgttctttgaataggaatttggcattcaaaacatagtatgtttgcgtaaatcaacaaacaaaaacatagagatgatagtcaacattcacattttaaagtgcttgattacttcctttttttctgtggtttttttttttttttctttctttttttttttctgaaacagggtcttgctctgaagcccaggctggagtgcagtggcgcagtctcagctcactgcagcctccacctcccgggctcaagcaattctcatacctcagcctcccgagtagctgggactacaagtgtgcaccaccatggccagctaagttttgtatttttagtagagatggggtttcaccattttgcccaggctggtctctaatttctgaccccaagtgatcctgctgcctcagcctcccaaagtgctgggattacagacatgaggcactgcgctgggccagaagtgcttgattacttcctaatatcagcaccaatgccagcatcatgaatctcttcttccattttcttaaaacaataattggattaataggtaccctacctgtaatatttgtattaataatatcttattagcattttaattagaaatttaatattaatgatttggaatcagtagttttcaacaattttaatagtgcaaatttatttgtagtatttgatggggagatatggtgttttgtgactatatttacaactggatgtatctgggaatatctcaaagtttctcccaaaaggaaaacatttctattacaaatatgtgacttgtgaaaataatttgtaattcttttcaatatatctcattttttttttttttttttgagacagagtcttgctctatcacccaggctggagtgcagtggggcgatcttggctcactgcaacctccgcctcctgggttcaagcaattctcctgcctccgcctcccgagtagctgagattacaggcacccaccaccacgcctgtctaatttttgtatttttagtagagatggggtttcacgatgttggccagactggtctggaactcctgacctcaagtgatctgcccgtctcggcctccaaaagtgctgggattacaggcgtgcgccatcacgcctggccaatacgtgtcattcttattacatgtcttcctttttatttttttttcccaccagctttttattgagctcctactatatgctgagtatgcagaggtggaaaagatagaggctttatcttcatccacctgagaagcatttattgagtatcttgggtgtactaggccccatgttgggcttggagatatggggctaagtgaaattgaattcccttcttctatgagtttactctattgggagggacagatagaaagcagttaccatgctgtgtgataagacttacaatagaagggatactgtaggagagaatggttaaggtctcagcacgagacaaatttccaatcctagctctttcactttaagttcaattatggcttcctccaagactggccatgcaacacctaatgctggagtgaggactcaaaccctcttctcacagtgcagccatatgttagaataaatatctaaatagatttgttttgctttgcttgcctttgatttgtggctacaaaggacatacaaagagcaaaattcaaattttctggtccttaaatctaatctctctttaacttttggaaagaaactatgtgcatgccagactgttggcacctgtgtgtgtgtgtgtgtgtgtgtgtgtgtgtttgcacacctgtggctcaccctcaaatgtacccttctaattcttcatcctttaaggaccagcgaaagtctctctttcgcattagtgatgcttttctttaccactccattctgtaataaaacaatctctaggtcctgtaaaaagaagggatcatataacaccaggctgagcactgctctgagcatatttcacttgccccatctcatttaaacttcactcatagtcgttgagtcaatcagtatttcttggacacctcctgtatgccaagtacttttccaggatctagagcatggagcagttaactgggtatcagcttctaggaattggcattctagtgcaggaggtcgacaataaacagaccaataaacataaataatctaagttagtataggtctagtgtgttcagcaaaggaaagtgtttgctaatgactggaccagcatagtcaaggaggaggtgacgttgagtttgaaaaataaggaaacagccgtgcaaagaagatatgggggcaggttgagggaggggcacattgtatggaggaggaacaggtgccaggtctccagaagggaacaaagtggcatttcctcaggcagagagatgccaagcatgagcagggtacctgtagtcccagctacctgggaggctgaggcaggagaatcacttgaacttgggttgtagtgagccaaaattgcaccactgcactccagcctggacgacacactctgtctcaaaataaaataaaaaaaaaaaaaagaaaatagatttaacggactcacagttccatgtggctggggaggcctcacatggtggaaggtgaaggaggagcaaaggcatgtcttacatggcggcaggcaagagaacatgttcaagggaactgctgtttataaaatcatcagatctcatgtgacttattcactatcacgagaataccacgggaaaaacccaaccccatgattcagttacctccccctgggtccctcccacaacatgtagggattatgggagctacatacagttcaagatgagatttgggtggggacacagccaaaccatatctatcactaagtctctaataatagattatttgtcatctggtgcccacccatctccctatagaaagtcatataatgctcatttaatatgagcctatgatattttagatataaacctttcagaaattgtggtactagcctttttttcttaccccctgtgtctttagaattaaaggtagacaaacttagtttcctttccccaaaattcttttagacattttgagtggtcagtaagattcccagctgtggagactactcatttaaataactttattcctggttttatgataaacctggtctcaaacccaggtaccagagaaactgtgactgttttttagatatgagcatctggaagctcaggagagagaggacactagattttcttttctttctttcttttttttgagatggggtctcgctctgtcgcccaggctggagtgcagtggtgtgatctctgctcgctgcaaactttgcctcccagcttcaagcaattctcccatctcagactcctccacagtggctgggacaacaggtgtgtactaccacgcctggctaattttattttttggtagatatttggtagatacagggtttcaccatgttggccaggctggtctcgaactcctgacctcaggtgatccactcacctcagcctcccaaagtgctgggattacaggagtgagccaccatgcccagcctatatctttatctacagtattctgatgcacctttgttcaggttgtgatatatatagctctgtggtaatactgtataaacaaggaaaaacaattaactgtggcaaaagcaaaggcacatttctatagttactgttaaaaaataactttacattaaaactttgtaacaactggtgattgtacattgtactaatattattcactggaagtgcattctttatagaaagttacataagtatactaaagagttaaatttaaatactataaacatatacagtacacagcataaatatttttgtgaaataaaaacacctcatggtttaattaaatggaatgtttctgtcacaatttatactttgaatactctagttttgttttgttttgtttttttgagaggagtttcactcttgtcaccgaagctggagtgcaatggtgccatctcggctcactgtagcttctgcctccctgttccaagtgattgtcctgcctcagcctcccgggtagctgggattacaggtgactgccactatgcctggctaatttttttatttttagtagagatggggtttcaccatgttggccaggctggtcttgaactcctgacctcaggtggtccacccatatcagcctcccaatgtgctgggattacaggcatgagccaccacgcccagcctgaatactcttaaaaactgtctgtaaaggatctgaactcccccacagccccatgtatttgattttagacaacaaagtctgggtgccttatttcatgtgtgaaagagaaatagaatctcaggtcccagactccctatgccaaagggaaagttaagcttgggaacagagtcaccagtaccatctttcttttgttcccaaacagatagccatgatttcacaaccctactatcctgtgtcactgcctcatttcctgtactccctcctttatcttaatataaaatacagatcgactgagtgtgagacaatgcacaatccacattttcttctactccctcttttcacatgtaaaatgtagatatactggggctaatcagggtctcacaagaaggtgaccatctcactgtctaccctccctccctttttcttttttttatttttttttcccttctgcttgctcttctttaaatactgaagtttacaaaactccctctagaaaaaagcatcacagatgcccctgccacattctcatctgtggctaaataaacctctaatcgattgagacctgccttagttactttttggttaaaatatacgtgtgtgtgcgtatatatgtatatatatatacgcgcacatatatacgcacacacacgcacatacccctcaagaagcaattaaaccgttgatatgtaatcttccaattaaagtagcttgatgcccatcttaaactgtaaattgaggaaaataacatttgtggctgtaatagatgatttatgtagggctctagggcagtcggagtctacattttagccagccttgtaaacttgtgtatggaattcatagttgaacctatagagagctgaacccctctaaggtctttgagcagctaagtggcagctcatcttgtaattgtaaggttaaacaaggatgtgtgatgtgtgcacatgcatctctctcctttagagacgttattcccagttgatgggctttactgaaaatcagcgaggccggtaaccggcttaccctgtgcacacgtggtggttgtcctctgagttgtgcctggttgcttcctgaaaagggtcgttttcagagttctccctgctctttgcggtcacctgaaaaaggtctttgtggcagtggatgtctcctctatcttgctgttatcatcatcatctgcatcagcatcttggggttggacagcagatcactccattccaagctatgctgttgggaggcttcccttggctttggaactcttcacttaccccattgcaattcagtgtccagcagtgctgaggccactaggcttagtcaccatacttctgcctggtggaaacctgattgtgtttcaggtttggctttgttgtatgaggttttctgttttcgggagaattgtggatggagttagtgaaaccaatagcagcactaatggagctttatgcacatttgagtgaaactgaaagttaaggtattaacttctaacttgtccttgaacctccaggggtaaatgttaaatttattctttaattttcttgctaattagtgctctagggaggatgaagaagtgaacaactactcttgttgactaatccagtggtccccaacccctgggccacagaccagtactagtctgtgtggcctgttaggaacctggccacacagcaggaggtgagcggtggacaagaaaacaaagcttgctccccatcactcacgttaccgcctgacctctgcctcctgtcagatcgtcggcggcattagattctcataggagcacgaaccctgtgaacattgtgaaatgtgcatgctagggatctagcttgcatctaccttatgagaatctaatgcctgatcatctgtcattgtctcccatcacccccagatgggaccatctagttgcaggaaaacaagctcagggatcccactgattctacattatggtgagttgtataattatttcattatatattaccacataataatagaaataaagtacacaataaatgtaatgggcttgaatcatcctgaaactacctccatcgccatccatggaaaaattgtcctccgcgaaaccagtccctggtgccaaaaaggttgaggactgtgttctaatccacttgtttgttttcaccaccttctggattcacagcaccctccactccacctgtagcacatgcctgccactgggctgcctctggcggaccccattctctgccccaatccttggcctcattatgcttcctcagagtcagttgtgattcttcctcaacgtattcatgctacttatccttgttactgtaattttgtgatggcaatacttatcatataaactgatgaaacaggaatgccacaagaaagatttgtttgacaagtcgaagccttgggaaagaaatcttcactttaaaaaattgttaacaaattatgtgtggatgagaataaatggggtggagatgagaattggaggaaaataggattgtgtgctaatagcttcacatgtgtcttaaaattcatagatgatgtattatgtgtgtgatatatacataagaaagaccatgaaaatctccaacatcagacccggacatgttttttcatgcctgtaatctcagcactttgggaggctgaggagggcagatcacttgaggtcaagagttccagactagcctgaccaatgtggcgaagccccatctttactaaaaacccaaaaattagctgggagtggtggtgcacacctgtaatcccagctacttgggaggctgaaagaattgcttgaacatgggaggtggaggttgcagtgagtcaagatcataccactgcactccagcctgggcagcagagagagactccatctcaacaacaacaacaaaaaaacccaaaccaaaaaaacctcaaaaccaactttaaggattttgtattgtgtatcccttatttccatgctggccaaatacaagttcacatcacagcagcaaagggctttgtctgttgccctgcttggggaagctggtaaggcttcctggttattcctgagccatgtaggggagaaggaggcacatatggcaggaagtgcaggagtttaggatatctacagggacactgcagtgtggaatagctgcatcaggaggtttgagacaaggcattagaggagatcagatggagagatgcagaggggccagatcacaagaaggcttgtttcttaagcacaggaatgtagagtttagacatttgggtggaaggatatggagaggaatgggagactgtcagaaagatggggttgtaccagcatcaggaaaacaagaaaggatactggtttggacaagtttctctttaggacatccaggtcagaatgccttgtgtggctaatgaaagcccttgcttctgaatagggggcccacactgcaggatagtcgatcccctcaggcatgtgtcattcacaaggctgtgtcccagtagaaggccagttaggtttgcacacctccgtgaatgctttactagatcaactgttaaagctgtcagatatcttgccaatcctgtcaaattatagttgcttgcaaaattggagctgttctcaattccaaaattaaaaggaagccagcatcatttatgtggtctgtttagggtgattctacctcaggatatcagagccatgaaaattccctttgcaagtgctcttggttctctaggaaaagcttcaggttttgtttttgttttctgtttttttgtttttgagacggagtctcgctctgtcgcccaggctggagtgcagtggcgtgatctcagctcactgcaagcactgcctcccaggttcatgccattctcctgcctcagcctcccaagtagctgggactacaggtgcatgctaccacgccaggctaatttttgtatttttagtagagacagggtttcaccgtattggcccggctggtctcgaactcctgacctcgtgatccacccacctcagcctcccaaagtgctgggattacaggcgtgagccactgcgcccggcccagcttcaggttttaaaggtgtgagtgttgagtgtgctactgtgaataagattagatgtgactgggccagtgtggtagttcacacctgtaatcccagcactttgggaggccaaggtgggtggatcacttgaggtcaggagtttgagaccagcctggccaacatggtgaaaccccatctctactaaaaatacaaaaattagctgggcgtggtggcgggcccttgtaataccagctacttggggggctgaggcagggagaattgcttgaatccaggagacagtggttgcagtgaaccaagattgtgccattgcactccagacagggcgagactcgatctaaaaaaaaaaaaggtgtgactagatatcacttgtaagtaaataacttcaaagtataatgtaggggccaggtgtggtggtccatgcctgtaatcccagaactttgggaggccgaagtgagaggattgctcaaggtcaggagttcaaaaccagcctgggcgacatagtgagacccccttctctataaaaataataaaagactttgccagagatggtgtcttatggttgtagtcctagcaatttgggaggccgacctggaaagaactcttgaacccaggagtttgagaccagcctgagcattatggtgagaccctgtctctacaaaaaaataaaacaattagctaggtgtagtggtgcgtgcctgtagtcccagctactctggaggctgagtccggaagatcacttgagcccagaagttcgaggttgcagtgaaccacagttgtgctactgcactccagcctgagcaacagagccagacccagactcaaaagaaccaaaaaataataataaaaaatttcaagtgtagtgtaggatggaatgggagaggcttggaatcatccttcttaagtttgactcctagctctaccgcttaccttctctttcctcacaaagccacatgctacgtctctgtaaaatggagaaaattctacctattccatgagggttattgtgaggataaaatgaagtcatttcaataacattcttagcataacatctaagctcactaaataaaaggtactttttaaatactacgtatatttttaagtgggagaaatagcctgacaatgacattatgctgcattaaggtaattgtcagacagttaccagacccataagtattaggacatgagtttgtattccagatattaggtttattatccctgaaggctttaatggctattttctcttctggaaccacagtatcaaaatcagttgttttcagaataaaccagtgagcactaaatatctcataataacgtaattttcataatattgctgaaacttccttggcccttgataacattgagtgtagagtctgagttatctagacttctgctagctaaaatctttgcctctaagaagtcttcctactagaaaaaaacaaatgaaaaatgaagataagatgcagaggttggatttaggcattttaattttttctgtttaaatttgggagtgctccgagtgtgctaacttgcacacagctgcactcagcaaaatactgtaatatattgaggcacacggaattgcaaaacctttcttccctacacacccctcatctaaaaaaaaaaaaaaatcagcagcttgactgagcttaaataactgacttttcatatcctttcatggaacacaaaggactagtcctgaggctacttgagccaccaatgcaggcagcagtggagaccaccactgaatgtgccagtccctcctcccacaaacaaaacacattgactgcagctttatgaagtgaaatgcccaagaaaaagaaaatgtgaaggaggtgtcctcagtcatttcttccctaggggggtgggagggcaggatgaggggcaggagaaaaagctgctgcatctggatgtggagaacaaagccatcctaagacttgagtataataggttgggtcactcgcttttatagaagcaaaagagtggaactgccttgacttgtctcagtaccactgacccttacatttcattgtgtagagatgtcagggaaagtgtgtagaaagcacactgaacaatgactttgtcattttgagatttctgaggtttgttcaccccttcccccaactcctaccctcaaatccccattggacaaaagagatcgttagttaggtcgccttgccgtcatttgaaagatctctgttttactgagtctttcaaaagtaaactcatccattttaactgaatcacggcgttctcatgctttcaaagtcaacaaaagagttttagtcactgcatttacaaggatggactagtctgtgaaaatgccagccctagagataatgattcatgccaactgccacattaaagtggatttccttgttaatagacagggcagttgatgacatgagttactggaaatatttgccaactcttgacccctggatttctgagatcaggatgataggattcacacaggcccactctaacaattcctttaccttttcttttttaatgaaagatgcaatggttgggttttttccagtgtgatagcacatgtagaaagcagtactgtcaccattagtgtggtgacagttaatcactggggaccctcccaggcttcccaggctggcaaccagtgttccaatttttcccagcatgtgtgttccaatgataatgtttgtagtttaacaagaagctaattaagacctaaagaaaaaaattaagagtctcatttttatcaagtctggtggtattcagcagaccatagaactttccattctggcatattggatgatgtccattgcaaaacaatagtggccattcgtggtgctttctcttcttgtcattttgcatccttagtaatgataaaatggacagctattacccaggagaggaaaatggccaaatgtttacttaattgaggacctttaaattctctctatgctattcttgattgattacattcatttttgtctgtatacctactgagttttcttgataagatgaacaaaaaaaggtttggactggagaacttgcctgagttttattaaaatcttgcagtcactattttctatatggatgtatcacttccatctgatgtggggcatgggtaagtgtaatctgttctacttgtgagttttgtgactcacttgttttctttcagccctttccctgggttcattgacttagtgttctctctcatttgcgttgagtcatgaagccgatagtgccgcttgtgcatcgcagcaaagggccagccacctatgggacacgtatcaaacatggatcaggagccatttttgttctagggcacatgggctggttaccattagttctcacatttgccctttcccaccctcaatgcacctgaggagatcatctcttagcgttatggttgtgtattgatacactgcccaacctctgcctgaacatggccaaagggatgggaatgaaattctagtgtcatattttttttaccctatctatttttattgaggtatagtttatatacaataaaatcgacagttttttttaggttgaattttactaattgtgtacattccaatatccaccctctaaaacaagatgtagagcatttccatctcctcaggaagtctcctttgctcctctgcagtcaattttcacacctctacacctcttccagatttctgtcaacatcaattagttttcctgttcttgaactacgtataaatggaaccaataatttttctgtggctggattcttttgttcaccatgtttttgagttctgtgtatgtttcagtggttcatttctttgttttctttttctgagtgatatttcattgtatgatgacatcaacatttatttgtctactctctgattgatgggtatttgaattgttgccagtttttagcaatgaatgttcttatagaagtgtttatgggtacactacatatgttttcattcatctcagataaaatgcataggagtggaattgctgggttcgtaaagttcactttaaaaaccaaaaatcaaactatgacaaggatttttataatggttgtactattttacacacccagtggcaatatatgagcattctagttgctccacatcctcgccaacatttagtatgatcaatctttttgtttttattctttttagtagagtatagatgatccatttgcattgccttgatgattaatattgagctttttccatacaggctaattggccattcaagtgtcttattttctgaaatactggttcagatctcctgccagctttttaaaacgtgtttttaaaaatcttgttgattttttagtttttaatatacataagtgtatttgtatatgtttaatattaggcatttgtgaatatttcctgttttgcaaattgtggtttttaatacatttgcttatttcgtcttcactggagaactttttgcatgaaactgttcataatctcacatttgtccatttaatgtctttataatctatagtgaaatttcttcttttattcctgacactgataatttgtttctgtcaatcagtttagcttggagtttatcaattttgattttttttccagtgaattcatgtttgattttgtaattttctctgtagttggtagattttctatttcattaatttcttatattttttaagttacattgatttaatttatctttttctttagctttttaagattgaacattaatctgttggttttcatttgtttcataatatatgcatttaaagttatacttcctctaagtattgcttagctgcatccaatgattttgatatgttgtgttttcattatctacagttcagaatatttatgagttgacttttttttttttttttttagacagtatctcactctgtcgcccaggctggagtgcagtggtgcaatctcggctcactgcaacctccacctcccaggttcaagcgattcttgtgcctcagcctgttgaatagctgggattacaggcgcacatcaccacacccagctaatttttgtatttttagtagagatggagtttcaccatgttgcccaggttggtctgaaactcctggcctcaagtgagcctcccacctcagcctctaaaagtgctgggattataggcgtgagccactgtacctggcccatgagttgactttctgaagtaatattttagtagtgagttattatggagtatataacttcatttctaaagatttagggattttttttttttaaaaaaccttactgctactgatttctaattagccttgttgtaattcgataacatattctgtaatatttctaacctttgaaatgtattgagacttctttaatggcccagtatttactttactttggtaacggtcccctgtgcatttgaaaaaaaaaaaaaaaaaaaaaaaagaatgtatattctgtagctgtggagtatagagttctaaaaatgacaggtcaagttggcttataatatctggatcttcagtatctttactgaatttttgtccactgttctgtcatttactaagagtggggtgtttttgcttggtatctctctctctctctgtatttacagtctttgttgtaagcagcatctaattaggtctggctttttaaatgctcagctgaaattctctgtcattttatgtggagtttcatccatgtacatttaatgtaattatagatacggttggttttaagtctaccatcttggtatttgtcttctgttagtctcatatgttcttttccttctttgcagtgaatagaatatatgttcttattttattttttctatcacatttttagctctactctttatgttattgtttttagtggttgctctagagtttacatatccatttaagtttattgcaatctattttcaaataatttcctaccaaatttgcaaacaatagaataatcttactattatataatttatttctgctattctttgggcttatgttgtcatattgtttacttctacatatgctataaacttcatgatatattgggtccattttgctttaaataaccaatggtcttttaaagaaatttatacatatgtatgcatgtatgtgcatacatattatagaaaattgtgttttatatttattcacatatttgtcctttccagtgctctttatttctttctgaagtctgagcttccatctggtatcattttccttaagcctgaagaacttcctttcaggctggtctgctagagaccttctcctagcttttgcccatctgagcatgtctttatttcaactttgtttttaatgatcttttcaacagatagaagattctaggttgacagttttctttttttttcctttttttggcactgtacatatatcacatcattgtcttctcccttcattgtttctgatgagaaaccatcattattatgcttgttgcactatacattatgactcttcatggctgctttttaaaacaatttcctctttgagtttttgctgtttgactatatgtgtttagtatccttcttgggattaatgagcttcaatatatgggttggtatttttatttaattttggaaaattatgagtactttatgttttgatacacttttcttttctttctcttttaactccttaacttctgggactgaaaatgatagtatgttagactgtttggtgtagctccaagatctagggtgttgcattccagtctttcagtcttttttatttttgtctttcatttggataatttgtattgctctgtctttagggtcattgattctttctcttatcccaatctgctgccagcccattgaatatgtttttttttttctttcatagagatgggatctcgctgtgttgtcctggctggtctcaaactcctaggctcaagcaatcctcctccctcctcaagcaaacctcagtgctgggattataggcatgagccactgtacctggctaaatgttgtttttttgatattcaatttttgtttatagaattttcatttgttttgctcttatacttttcatctttttatgtttattgaccaattgaatatcatttgggtaagcacctatttaagtgtcttaacaatttttctattgagtactctgggtttttgttttgtttttcttactgatttgtagaattctttatgtattctgaattgcagataccttccttctgtactaatgcttatctttttagccctgtaatattgtgttttcataaacatacttatcaatcttttcctttatggtcattgatttttgtgttctgtttaaaaaaatctgtatctatttcagtgtcttatttatttatttgttagttttccataagttactgaggtacaggtggtatttggttacatgactaagctctttagtggtgatttgagagattttggtgcacccatcacccaagcagtgtacactgcaccatatttgtagtgttttatccctcgccctcctcccactcttccccctaaacccccaaagtccattgtatcattcttatgcctttgcatcctcatagcttagctcccatgtatcagtgagaacatacaatgtttggttttccattcctgagttacttcactcagaataatagtctccagtctcatccaggtcactgcaaatgctgtcagttcattcctttctatggttgaggagtattccatcagatagatagatagatagatagatagatagatagatagatagatagatagataatctcacagtttctttatccactcattgattgatgggcatttgggttggttccatgattttgcaattgtgaatcgtgctgctataaacatgtgtgtgcaagtatcttttccaaataatgatttattttcctctgggtagatagccagtagtgggattgctggatcaaatggtagatctacttttagttctttaaggaatttccacactattttccatagcgactgtactagtttacattcccaccagcagtgtagaagagttccctgatcactgcatccatgccaacatctactgttttctgatttttttattatggccattcttgcaggagtaaggtggtatcacattgtgtttttgatttgcatttccctagtcattagtgatagtgagcattgtatatcttctttccagaattttctcttcatgtcctaagtccactttctgatgagattgtttttttcttactgatttgttctaattcattgtagactctggatattactcctttgtcaaatgtgtatagattgtgaagatttactcccactctgtgtgttgtctcttcactctgctgaatgtgccttttgcggtgcaaaagctccttagtttaattaagtccctactatttatctttgtttttattgcatttgcttttgggttcttagtcatgaaatccttgcctaaaccaatgtctagaagggtttttccaatgttatcttctagaatttttatagtttccaggtcttagatttaagtctctgatccatcttgagttgatttttgtataaggtcagagataaggatccagtttcattctcctacatgtggctagccagttatcccagcaccatttgttgaaaagggtgtcctttccccactttatgattttgtttgctttgtcaaatatcagttggcggttaagtatttgggttctctattctgttccattggtctgtgtgcctatttttataccagtaccatgctgttttggtgactatggccttatagtacagtttgaaatcaagtagtgtgatgcctccagatttgttctgtttgattagtcttgctttggctctgcgggctcttttttggttccatgtgaattttagaatttttttttttaattctgtgcagaatgatggtggtattttgatgggaattgcattgaatttgtagattgcttttggcagtatggtcattttcacaatattgattctatccatccatgagcatgagatgtatttccatttatttgtgttgtctatgatttcttccagcagtgttttgtagttttccttgtagaggtcttttgattccttggttaggtatattcctaagtattttattttattttaatttttgcagctattgtaaaaggggtttagttcttgatttgattctctacttggttcctgttggcgtatagaagagctactgatttgtgtacattaatcttatatctggaaactttgctcaattattttatcagttctaggagctttctggaggagtctttaggctttccaaggtaaacgacagtttgacttcctctttaccaatttggatgccctttatttctttcttttgtctgattgatctggccaggacttccagtactatgttgaagaggagtggtaagagtgggcatccttgtcttgttccagttctccgaggaaatgctttcaacttttccccattcagtattatgttggctgtgggtttgtcatagatggcttttattacattgaggtatgtctcttgtatgccgattttgctgagagttttaatcttaaagggatgctggattttgtcgaatgctttttctgcatctattgagatgattatgtgattttttggttttaattttgtttatgtggtgtatcacatttattgacttgcatatgttaaaccatctctacatccctggtatgaaacccacttgatcatggtggcttatctttttgatatgttgttggattcagttaacaagtattttgttaaggattttagcatctatgttcatcaaggatatcggtttgcagtgttctttttggttatgtcctttcctcgttttggtattatggtgatgctggctttatagaatgaattagggagggttccttctttctctgtcttatggaatagtgtccaaaggattggtaccaattcttctttgaatgtctggtaaaattctgctgtgaatctgtctggtcttggacttttttttgttggtaatttttaaattaccatttcagtcttgctgcttgttattggtctgttcagggtatctaattcttcctgatttaagctaggagggttgtatttttccaggaatttatccatctcttctaggttttctagtttatgtgtgtaaagatgttcatagtagccttgaatgatcttttgtatttcagtggtgtcagttaatttttctctcttcttttcttggttaatcttgctaatggcctatcaattttatttaccttttcaaaaaaccagctttttgttttatttatcttttgtgttttgttgttgttgtttcatttcatttagttctgctctgatcttagttatttcctttcttctgctgggtttgggtttggtttgttcttgtttctctagttccttgaggtgtgaccttggaatgtcagtttgtgctctttcagctttttcaatgcaggtgtttaaggctatgaactttcctcttagtactgcctttgctgtatcccagaggttttgataggttgtgtcattattgtcattcagtttgaaatattttttaatttccatcttgatttcatttttgacccaatgctcattcaggagcagattatttaatttccatgtatttgcatggttttgaagattccttttggagttgaatcatatggtctatcttggaaaaagttccatgcactgtcgaatagaatgtgtattctgcagttgttggatgaaatgttctatttatgtatgttaagtccatttgttccaaggtatagtttaaatccattgtttctttgttgactttttgtcttaatgatctgtctagtgctgtcagtgaagtattgaagtcccccactgttattgtgttgctgtctctcttatttcttaattctattagtaattgttttataaatttgagagctgtagtgttgggtgcatatatgtttaggactgtgatattttccttttggacaaggccttttactgttagataatgtccctctttgtctcttttaactgctgttgctttaaagtttgttttgtctgatataagaatagctgcccctgctgtgtttcatgtcgatttgcatgaaatcctttttccacccctttaagtttctgtgagtgcttatgtgttaggtgagtctccagaaggcagcagattggttggtgagtttttatccattctgcacttctgtatcttttaagtggagcatttaggcaatttacattcaatattagtgttgagatgtgaggtactgttgtattcatcgcgctgtttgttgtctgtgtactttgtgttttttttgtttgtttttgctttttaacttgtatttttgttttataggtcctgtatgatttatgctttaaagagtttctgttttgatgcgtttccaggatttgtttcaagatttagagctccttttagcagtttcttacagtggtggtttggtagtagtgaattctcttagcatttgtttgtttgaaaaaaactgtatctttctttcatatgtggagcttagtttcactggatgcaaaattcttggctgatcattgttttgtttgaggaggctgaagatagggccccaatcccttctagcttatagggtttctgctgagaaatctgctgttaatctgataggttttcctttataggttacctggtgcttctgtctcacagctcttaagattctttctttggtcttacctttgggtaacctgatgacagtgcacctaggtgatgatttttttcaatgaatttcccaggtgttctttgtgcttcttgtatttggatgtctaggtctctagcaaggctgaagaagttttcctcgattatttgcccaaatatgttttccaagcttttagaattctcttcttcctcaggaacactgattattcttaggcttggtcgtttaacataatcccagacttcttggaggttttgttcatattttcttattctttttccatttgtatttgttggattgggttaattagaagaccttgtctttgagttctttcttctactacttgtttcttcttctttcttctacttattcagttctattgctgagactttccagagcattttgcatttctgtaagtgtgtccaatgtctctcgaatttttgattttttttaagctatctgtttctttgactatttctccctttatgtcttgtattatttgttggatttccttgcattgtgctttgcctttctctggtgcccccctgattagcttaataactaacctcctaaattctttttcaggtaaatcagggatttcttctcagtttggatccattgctggtgaactagtgtgattttgtgaggctggtaaagagccttattttgtcacattatcagagtgggttttctagttccttttctcatttgggtaggctctgtcagagggaaggtcttgagctgaaggctgttgttcagattcttttgtcccacagggtgttcccttgatatagtactctctcccttttggtgtggatacggcttcctgtgagccgaaccgcggtgattattgtctctcttctgggtctagccacccagtgagtctgcctggttcccggttggcactggcggttgtctgcagagagtcctgtgatgtgaacctcacagagatctctttgggtctctcagccatggataccagcacctgttccggtggaggtggtcggggggtgcaatggaccctgtgacggttcttagctttggtttaatgctctatttttgtactggttggcctcctgttggaaggtggcactttgcagagagcattagctgtggtagcatgaagaggaactagcagtgcacaggaccctaggactccctggattatatgccctttgtcttccactaccacggtgcgtagggaaggaccatcaggtgggggcagggctaggcatgtctgagctcagactctccttgggtgggtcttgctgcagagtatttggggtgtctcctaggtcctgcagtagcagtccacttccttcaaagggtctgtggctcctcttgggattgctggtttgttcttgaagtcgatccagagctaaagttcacatgcaagcctctgcacactgctctgttagtccgagtcagagctgcaatctagtcctgcctctcgtctgccatgatcccacctcttgggattggcttctttttttttttctttttttgacagagtctcactgtcacctaggctggagtgcagtggcatgatttcggctcactgcaactttcatctcctgggttcaagccctggtgttttcttgccactatttatatgatcatgtggttcttcctgtttcgttaacctgataaatagcattgattgattaattgtcagatcttaaatcaggcttgtattactggtgtaaacagtttataaagtataattattttttatgttcttagattcagtgtatttagtatgttatttagtgttcttttttgttgttgtttgctttttcacccaagctggagtgcagtggcgtgatctcagcttccggttgcaagtgtttctcctgcctcagcctcccaagtagctgggattacaggtgcccgcgaccacgcctagctaaattttgtatttttagtagagacggggtttcaccatgttggccaggctggtctcaaactcctgaccttgtgatccgccctccttggcctcccaaagtgctgggattacaggtgtgagtcaccgggcccggacttagtgttcttaacacagtttggtttataattttcctttctttggtttttatatcaggataatgctggattccaattctctagaagaatttgataaaacttctgcaaaatcatcttgtgacccatctttgttttttctatgggaaatttttgtgtcatgaattcatattcttaaattcaataatagaattattcagatttaggttttttattatgtcagtctttgcccatcatttttccagaaatttgccttttgcatcaaaatttttaatttattggaacggtgtttattatatattctttttaatgcctgtagtatctcttctgttattccctgttaattcatgataatgataattttcctctctttttttcttgattagtctttttgaagtttattgatttcatcagtttttttatataatgaggctttgggtttgttgatttttctccttcaaattagttttctatttaatcattttctccttttttctaatttccatttttctcagattttaatttaatatgctactcatttttctatctttgtaaggtatatttttagatcctttacttttaacctgtctttaaaaaaaagtttgaaggaataattttacttgtaaacagcattagttgcagtcctgaaattttaatattattaggttttcattttcttttatttgaaaagtttctaattttattgtaatttatttgaaacaggtgttatatagaaatatattgctgaattcctaacatttctagttacatttctaattacattgatttcatgttaaatccacttatgtcagaatatattctgtataatatctgtctcttgaagtttgatgatacttgctttatggcataataaagatgcacttgaaaagtgtgtttatgcagttattggctatagtattgtagcctttaggtcatcattaagtcaagtttattaatcatgttttcaaattttctctgtcgatttttatgtgcttgttatatcagttattaagataagtgggttaaaacttatcttttatttccacttttatatgccttttctaagatgtgtatttttaaggtagcatatagacggacttcagccttgaatttcataataaacattaacatggaaaaaatgtacaaaggaaaccatctgtcagtgagatatgctgaccacaaaggaagggagaggtgcaccacattgctctaatgccttacaccattcactcttcattggagttagctgggactcaggattaagcactaaccgaagtccaacacaggtaccagcgctggatgtcaaaagatcagattagcatatgagggatgaaaggagtgattaatgtatcccaagggaaggacaagtttagaaaagcttagagaatgtttgtttagatcttgtcatacacagaagacataccaacactccataaagttctgatttaaaggcattcactgggttggatgaggtaacaaaaaaaacagatgtaaagtagagatctccccaggtgggacctgggaaccagagttgacctctgaactccctgaggcaggtgagatgctacagtagcacataatttacatctgctgacttagtgctgatgctgtcagtatttgggcttaggagcttacatttaagtgtcttccatattgtcccttttgcttctattcatcctgtaattgaaggtaatgataatgatttgacagaattacatttttatttcttaatattcctgtcggtttgtataccctgttcataattttagtggctccagaagaaatcctgtattagccaggagcacaacctgttatgttagtcatttcattgagaagtaggttttatttttttttgagacagagtcttgctctgtcacccagtctggagtgcagtggcatgatctcggctcactgcaagcctcagcctcccaagtagctgggattgcaggcatgcaccaccacgcccagctaagtttttgtgtttttagtagagacggggtttcgccatgttgcccaggctggtgttgagctcaggcaatctgcctgccttgacctcccaaagtgttaggattataggcgtgagccaccgcaccctgccagttttttgtttgtttgttgtttgtttgttttttgttttagtctcatgtgttcccaaaataaataagtagaagaatttcttctgccaccctatcagtaaacaccttactgatcaaaaactagtgggcaatttttttctctctaaatcagaagaaaatcttgccatagtctctcaccaagaagtgaaccctgctttgtttattacacctaagatttgtcttctgcgaagtcagtaatcgtttaaagcaatctggatgatttgtacttatcacagcttagaacacaattcttcagtggcttacagcagaattaaaagctttccactttctgtgaggtgttagcaaccttaatgatcctgattttatgttttaataccataaacaaatcatgaaaataccatctactgattaagtgacctcatgattaaatacatatttcatcttgtacctaatagaaggttgacagagagagggagagttcaaatgaggaatagaatgagccagaaggatggatggcatttttatttgcagaaaataggaatacatttttactgctgtttatagaaaacatgttcgttggcacaagcttcacaaagactagcaggaacagaatcccacaaaatgaagtttaaagtaaatagtggatagatacctaaaaatttctccaggactcaaagcagtttggtggttaaatgccaaacaggcattgtagttaaaattatgcttgttaaaagaatatgttccattctgtaatgttcggatacaaaattaattctagaagagtctgccgggggaaattttatatttttcactaccattcaaatatagatattgaatatgaaatgtattcaaccttcattttgtgtcctgaggttttatatatttattaaaatgtggttcttctttttttcttaagtcattttgttttctgggtctagaactcatctttttgtaagacttttagatgtaaacaataattcttaaatcaatatgtgttgccatgttctattagcaaatattttaagactttttaaagatcagctcttctttttgagctgagaagtctgttatttcctaattagctgggagctgggattggtcacctcactgagagaccagatataaccacacacacacacacacacacacacacacacacacacaataaccttaaaaactagaaaattcagaaaacaaaaatataaaaaatacagatatatttcggtattaaatgctttaaaaaatatgaatcgtgtgtaggatatagtatcttgcagtgattaagagaacaggtgtaaggtcagtatgactgaattttctgtctttgaggaagttactgaacctctctgagactcagtttcctcctgtgtaaatggagatgataatccctcctatttagatatgagagtgaagttagataatggatgcgaaatacatatgtactaaggtttggatataagcaaggcttatgacatgttgcctcttcttggtttttgggagggcagggcaattgtacctttctttggctgtcagctaggtacagaaaattgtgggtggcctagtaggccagatgctgggctggtgggtcaagatgcaggtggtggtgctgagaagacacacacagaactgcctgtgttcccgcagcaagcaaactgtgattgcgacccgcaagtgattatttatgctgtactttctggttgtctgttaaacctgcctgtgaaaatcagttgtaagtcttccttagaaacctctacaaagtgtgcatgtattcctccttatatttctttttgtttgtttgtttgttttgttttttgagatgtagtctcactttctcgtccaggctggagtgcagtggcaccatctcggatcactgcaacctccagctcccaggttcaggcagttgtcctccctcagcctctcgagtagctggggttacaaatatgcggcaccacacccggctatttttttttttctcagtagagatagggtttcaccatgttggccaggctggtctccaactcctgacctcaggtgatccacccgcctctgcctcccaaagtgctgggattacaggtgtgagccaccacaactggcctctccttatatttctatagcactctgtactttctgctgaagtcatgtacttttatgtaagacagtgaactttggaggcctcagagcatgtataacgtgaatctgcacgtcccccactgttctatccttctcaagaagcaagcgttgtggtttcagagtaggtagggactaacttgagttgcactcatatttcccgaagccatagaccgtgatatcacacgtttcctaataaagatgaatactgaaatgagcatcatccagtgtcttgggtttttatgcttcttgcttttgtttttatatttcaccttttagaccaaggtaatttccaaagataatgtcaccttgctgggtgaggtgatgggtaagtgaacattcacagacccgttagcacagtgccttgcacgtgctcatacatgtcatttgctattgttatcatgtgcctctgaaatagacgtttgaaatactctcctaatcgtggaaaatttaatgcatatccaagtgttaaagctaaaaaaaaaaccctgttagacattttgacttgttttcttgttatcaaacctcttcctcagtgctactaaatgtaagagaaatagaagacaaaaatttctgacaatataaaattcaatatattgtaataaaaagaaaaaagtctcaggtcttttaaaacatgtaaaatttaattacatttctcttatctattctttattgggcatgttaatgaactctaatttcttatgtaagtgtgtttaggggaaaaattaaagaaaaattcagggattttatcctgaccaataaaaagctagccgtatgctggggacaagctaaaatgtagtggctgacaatgcatgctcctcagctctgtgactggtgctgtgtgttcttgatcaagttacttttttctccctgtgcctcagtgtctccatctgtaaaatggtgtagtaatactacttcatagggatattgtgagatttaagtgagttgatacatgtgtatttaatatacagccagatacacaatcagcattcagtaaatgttagcaaaggatagataccaagagagatgactccccacttccaaaggtgaagatttaaattatttcctttttttctgagcactgaatttgcaattagtcacttccttatcccgtgcatagctgaggcttctgggttccttgtctatgatgcctgcttgctcatttcccgcataacatcaactgactcatgatagtttgggattcaagtcctactctaaatctcagttttctcatccattaaatagggaaagtaataatgcctgactcatgaggctggtgagtgtttcaaaagaactaatgggggcctggtgtggtggctcacgctcataattccagcactttgggaggcagaggtgggcagatcacttgagatcgggagttcgagaccagcctggccaatatggtgaaacaccatctctactaaaaatacaaaaattaggcatggtgacatgcacctgtagtcccagctactcaggaaactgaggcaggagaatcacttgaacacgggagtgggaggctgcagtgagaggagatggcaccacttcactccagcctgggtgacagagcaagactccatctcaaaaaaaaaaaaaagaaaaaggaaaaaaaaacctaatggataagtttatatcatagtgtttggcacatggcaggcatgtaatagatatcatcaggaccacctatacttttgttattcctttgtatggaaaagcagtccctggtactacaataagtctttcagagaaaggagtgtaatcctaacaacaactcatgaaagtatttttgaaaagaatacttgataaggaaaacctgcatctacttctgctatttcagacattgctacaagtggttggtgtggtctctgtggctgtggccgtgattccttggatcgcaatacccttggttccccttggaatcattttcatttttcttcggcgatattttttggaaacgtcaagagatgtgaagcgcctggaatctacaagtgagtatggaaactcgggttggtatagacatgctagctagtttccatttatgccataaattacagagaccccctgaaattcggcagactctgtcttccagaatttctctaacattaggtaattgaacgtattggccattatgaatcattgtgtcccttagagcatgtggaattgatagcctgcaacgtgcaactttgcatttggaataaggaaggagtgaaggccatatggggagtaatattctacaggaatgtcagcactgtgaagacagggactctccgtgtcttgtttatgacatactttcttacacaaagccggcacttaattaaacatttttcttagaaataaaatatttgatcatggtgaaactaatatagaaggaaaataattagggtattttagcatctttccccgaagatactaaaagtgacaaggaaatgagaaggatggagaaaggaaaagaggtgtcagaagcaatgtatttggtaaatttatgacttttgcaaactcacaaaatggctaggaagttgcagttttaaacgttttgaaaagataagcattgttattttcagttttccatttgttaccagcggtgcttgttctaatgtcacagtttgaggtttttccccctcaggctgtttatatatatatggacactgaaaataatccccttagatcacaaggagatatatcagtttagaaaacatatagtctgttgctctcttcaatttcctagttttggaatcatgaggaagacattttatgattaatcactctattccacatgtaatcgcagagatgaaataatccagagttcatctcattatgcatgcacaaattaacatatttcatcattgttaaacacaaactcataaggagagtagaattgctttactttttaataaaaggtataaggataatagccaaaaaataaagaaggaagatatttgtatcagaaaagctgaatgccaactcagctctctggaagccacgcctagaagagaagcattgagtcccatcattttcagtatcttctactgagtggtaaatagaagtttattaggacaaagcagtttttggttgtgacatatatatgtttctcttttaacaatgaacatttatttatttatttatttattttgagatggagtcttgctgtcacccaggctggagtgcagtggcgcaatctcagcttactgcagcctccacctcctgggttcaagtgattctcatgcctcagcctcccaagtagctgggattacaagtgtgcaccaccacacctcactattttcatattattagtagagatggggtttcaccatgttggccaggctggtcttgaactcctgacctcaagtgatccacctgcctcagcctcccaaagtgctggaactacaggtgtgtactgctgcacctggccaacagtgaactctaagaggcatttatcctaagtgtctgcatgaagtagaaggggtgacagtccataaaagttgtagaaaaacttttcagtcatcaagaaaaccagctaagctaccatgaggtctagtcttgtaaggttttcagtgggcaggccgagcagtggagtccacatgtgagtaacacttggccaataggacttgctagggaaggtagagtataattgctgggagaccttccttgtgcagatgactggccctagccagtgttgtgtgtggacagcaaggctgtgcaggcattttatggtttgggcccgctcatgaaatgaagttattcgagagtcttgttttaagggagtctgtggtatgttgaaggaagcagccgttccagaaggaacatcttgacgtagactgtctgtgtcaacagccacatccgatccatgtggatgtggagaaaagggggacttaggaaggctttttgggaagcagtgtaggattttctctcttgaatttcagcatgtaccttaaagcttgaaaacattttcatgtggagattctgacaaccttatcatggcccctgaggcatatttgggtgttcccgtaccctgattggctgtaacaatgagttaaatatgcaggattctttctccatgcgctcagatcaccaaccacgggggctggttggttggaactatttactgttattcgtccagggtggtgggtctctgccataagtcacaattccactgtttcttctcagcagcagtggatcgtggtttttgagaccactgctggagtcaccagctgaaagcaggatgcctgactgccgtggcagggaggcataatccagcttcatccttgtgccctcaaggatttccaaagcctctgttggactgcctcactgcccctggagtcatagccggcatttaatgaatcttaataacaaatctgggccgggcgcattggctcacacctgtaatcctggcactttgggaggccgaggtgggtggatcacttgaggtcaagagttcgagaccagcctgaccaacatggagaaaccccatctctgctaaaaatacaaaattagctgggcgtgatggtgcatgcctgtaatcccagctacttgggaggctgagacatgagaatcgcttgaacccaggaggtggaggttgcagtgagctgagattgtgccattgcacttggcaggctgaggcaggagaatcacttgaacccaggaggcagaggttgaggtgagccgagattgcaccattgcactccagcctgggcaacaagagtgaaactgaaaaagcaaaacaaaacaaaacaaaaaacaaaaactaatctgcagttgatcattttatgtttgcaagagtcaccatatcaacagtcagtcatagagaagtacataaaaaccggaatggcatttggctgcatttctctagccacctccactcatttggcaatgcctgaaatgtgaagccgtatccaatttctgtttgtaaagatattgtgatccactagcaatgtctgccatgagtgtgaacccatgtgtcccatgttcgttcatcctagattcccagggactttgttcaatgcaaggtggttaataaccggcacaggaatagggaaggctgttggatattagctaagtaagattaggggatttttaaagcgtgggctacaaagtctggagaaaaatgccctcaggatgcatgagaacctttaactctgattattctctctctctgatactgtggctcagattaaaagcacagccttggaaataaaacagatatgagtccatgcccaagtctaccacttgcgtggcttactttacttaaccttgggcagtgttttttttgttttcttgtttttgtttttttgagacatagtctcactctgttgcccaggctagagtgcagtggccgtgatcttgggtcactgcaacttccacctcccgagttcaagaaattctcctgtctcagcttcctgaatagctaggactgcaggcacccgccaccacacctggctaatttttgtatttttagtagagacagggattcaccatattgatcaggctggtctcgaactcctgacctcagatgatccacccgcctcagcctcccaaagtgctgggattacaggcgtgagccatcgcacccagctttgggcagtgttcttaatgcctcaagtctgtttttccctctgtcaaggatataatacttatgagggttgcctgagactgcttggaaaccttgaacatacgggaactaccagaggcgctatagccttgagaattaaaaccgtaataaccctgagaggtcctacacagcgtcagtaccccgcagcaagactggtagaccagatctttgcatgcagttccttttcatgttcttttcagagaagacagaaaatctctgtagagtgtatcctaaagagttctctgtgttgtggaaaacacagctattgatcttgtgaaacggcaggttgtgtcagctggaaactgctgactagtacgttagagctgaggcttgacatacgctctccctcggtactagttagttgtctttgcagacctcccagctcaccctcactggcagccctctcagccctaagtggggtgtgaaagagaaaggactatcttttcaaaggttacaaattcctgctataccttggtaatttggtgtgaattaaagtgtgtagcttgatcttcatgatattcccgggtgttccaaaactgggatggtacctaatttctcaagttgaccctgccctgaaacccagttggagataaaacagtggcgacttggatctcctgatgaggaaagcaaatgacaatagctatgttgaagaatttcattccaggactctgtccccatgactgccacatctccttccttctcagtggcattctttatatgatggacgcgttcagtcacaacactcccttgctctggaggtaagagcatggttctagtgatttctctgaactactgggagccaaactctttgtagggtaatggggcctggaattctcttgtgttattcccaatatcaccctgtttccagattgaccaagttccagggtgcaggctagaacatctgaggcgtgcagaaaagacctgtgcagaacatccagcctttctcacagaagcaccagctcagtcctcttgcggtcatgtcacctgccaccttcccagtgcaaagttacaggttatagagagctgacacaaataacgagtaaaaggttactctgtgtgttgaagagtactctttttgttttcttgtttttgtttttttgagacatagtctcgctctgtcacccaggctggagtgcagtggccgtaatcttggcttaccgcaacttccacctcccgagttcaagcaattctcccgtctcagcttcctgagtagttgggactacaggcgcccgccaccacacctggctaatttttgtatttttagtagagacattgtggatgccagagatagagaatagagagaaccctgtggactcgtgggaggctctctgcctgaattagacataagggaagtgccagatcacattctggtggagaatctatgctcagggaaggtctggtttcttaaagcactatcacaggagagggcccctaaaagttagtgcccccagtcagatgtatcagtcaggaaagagccccaaggatgggtggacagtcagtaacctgcagctccatctgcctttccccaacccagggcttcccactttctcagaaccccagtgtctcatacctggcggcctcctccttcacttacggaactgtggactctggactctgatatatgtggaacctccatgtcttggcacactggtaccccagcacccccaaatgtgtagtgtctgtgtgtacagtgggcacaccagtattgagtcagctgtagcacagatcggcatggggatgctgtactaagagtccgacccagaaaatgagttagaatttttctcttaaattttccactccctccgccccttacccccaccctaccccctcatcattttataaaacatatgtagccatcgcctgtaagatagattggccacgcacggtggctcacacctgtaatcctagcactttgggtggctgaggcagcctgattgctggagcccaggagttcgagaccagcctgagcaatgtgacgaaacccagtgtctacaaaaatatataaaaattagctgagtgtggtggcacacctgtagttccagctactcaggaggctgaggtgggaggatcacttgagcctgggaggttgaggctgcagtgagccaagatcatgccattgcactcaagcctgggtgacagagtgagaccctgtctcagaaaaaaataaataaataaaaagttatcttaacttctcccggacaccccatgttttactaacagggtcttctctggagctacacaggtagcaaagtcagtgtttgctaattgcaaagcacaaatcatttatcccagaaaagaatgctaaagacattgtgctaggtcacgtgtccccaatatgcacctgccccagtatggcctcattcatggtagacaattgaaactctcaggaattcctccctgcccaaaagtagctagccctcatgtccgctgctatgcaggagggaggtatgtcctggtagtcatcaaatggtgtgcttgaaacacagtggcctgctggaaatggtggctcacacctgcctgtaatcccagcactttgggaggccaaggcaggaggaggaccctcatctctatgaaaaactcaaaaattatccaggcacggtggtgtgcatgtctagtcccagctacttgggagcctgaggtgggaggatcccttgagccttggaattcaaggtggcagtgagctatgatcacaccactgcacccagcctcggtgacagagtgaaatcctgtttctaaaaaacccaacaggccaggtgcggtggctcacacttgtaatcccagcactttgggaggccgaggtgggcagatcacctgaagtcaggagttcaagaccagcctggccaagatggcaaaaccatgtctctactaaaaattcaaaaattagccggccgtggtggtggacatctgtaatcccagctacttagggggctgaggcaggagaatcgcttgaacgggggcaggtcggggcagggcggcaactccctcttaaaaaaaaaaaaaaaaacctacaccacacaaacaaaaacacaatggctcaaggaggagcagctggtcagggaacctcatgggatatacagctcccaaagaaaaaagaagtcacacaaaaaagaattcacttcttaaaattctgtagagatgaagaacccactgagaccacagtcagattctgaaaaaagcaatggcacatgccatagagacctccagagatcaggacaagtttgcagtggggcagtcataaaaacatccgtccggttcctggagccaatgttaagaccattcagagacatcttggctgggcaggttccttgggcacggcacaagggcattgcagcacccaggtccatggagatcacaaaggattcttccagcatgagtgggcacagaagattccccaggatgcagggaagtgacagtctgtctgttcagctcacttactgagtacctgtcctgtgccaggtaccatccagttaccagggtgcaatggctatagctgacccttgagaaattagcaatttaaggtggggacagacacatagatggctaattgtaattcagtatggtgagtactcttaacagagaattgttttttaaaatcctactggctcaaaaatcagaaaaatatcatttctgcccaaagagatgtcagggaagaatatggagaggaggaagacctggaaggctgagttaggaaggaaagaattataactagatttgaatgtggtcaaaaataggacgtttatttccaggccccttatgtgaggtgtggtttgagcaggagcttgagattccagtggcagggtcccctcaggctattgggaacatttatttttccttgaaacatgaagcctcctaggaggcctgcgtgtgctgtttggtggatacgtgaccatggagcttgggaggccgcaggtttttctgcacccagcctcactgagctgttttctctgtctgtttccccagctcggagtccagtgttttcccacttgtcatcttctctccaggggctctggaccatccgggcatacaaagcagaagagaggtgtcaggaactgtttgatgcacaccaggatttacattcaggtctgtctatttctggaaatggtttcaaaggacaggatctgctgctttttctggcttaacctccctggtcagatgagcttgttggcaggcacctcagggcccagccccacatcctgctttttttgcgcatcttcgtctccttccccatccccttcttctgggcttggactcctctcggaatcgctgctgcacgttccctctttgtgccccctgactggcttgtggggtctttctctcaccatgcatggcctgtggctctgtcagcaaacgttttctgcaaaaggccacctagtaagtgttttaggcattgtgtgccattattgtctctgttgtgatgaatcacctttgccattgtagcacaaaagcagatgtcaatacattggcaaatggctgtgactatgtttcaataaaactttatttacaaaaataggtgctggctcacgtgctgtagtttgctgaccccttgcatcagtgaagattttttcaatatggaaatttcagaatttccaccaaatctacaaaattcagatccgtcattccaatctttattttatcttgctgattaaatggcactttaaaaaccacatgctaaaaggaaaaaagaagtagcaaacaaacaaacaaaaaaccacatgcaaatcctgttagtgaggtcatttttatatagcccctaagcaatagtcagtgtgtgtgggccttctggtaagtatggaaggtgggagaagtaaattgggagctgcactctgctgttggagaactggaccagtcaaccatgtgtgtgggtggacttcacatgagatgcacttcacataagtatttctcagcactgtacgagatgtccttatgagactacttttctcagttctttattaggatcatatttctgggtttcatattcgcatgcatcctcacagaaagccacggtaccattgtgtatgtgtatcgtatattgcctgtatcacttagctttctggaatctaaaggttccttgggtgtgcaactttggtgccctactccacgtaaaaatcttctgtagctcaactgagcaaaacacactcgcacattcatctacttattcatcatgcttattaccgttctcaaattcagaggcttggttcttgtttttgacaacgtcccgctggttcgccgtccgtctggatgccatctgtgccatgtttgtcatcatcgttgcctttgggtccctgattctggcaaaaagtaagtacagatgtgaataactatgtatggtatgattacaatttatagctgtgtttacatttattaaactcttgccaccttgtctactactacatactgtttggtcctaatgaagtgtattaaatcatttacgatgtgtcaggttgggtaggattcagcagtgtgactcatttaaggagtcatttgggtcttgatgggtttatctttctttgaatgggttgagatatgcgcagttgagattctgaacattcctgttagtgtctggtagttgtgaagagaaaaccaatttattctgaagcattttgtccaacttagggtgttagccttccaactacttgaatctattgtttgtagttgcctggtgcatgaggttgagaaaaattctcagcaggagagtattatcttcaatgccacatgggtaccagacaagcagggcatgagttcaccaccccagtaacaacagtgcattacaatacttaataatggaacaaggagagtagtattttagtctcaaaagcattggcacttacaacctattgctttgtttttagtggtttccagctgtggttgcattgcacgtagaaagtggaataatgtaatgggctttgaaaccataataatgaatgtctgaataatgacattatttcttgcgtttgtaatactgttaattaaatctatgtcgatcctgttggaattcataaaatcatctaaaaatttttctaaatatacagtgttgttttccccattgtatcttgatctcaagcaacaaatggtaaaagtatagctattaatgtcattaaatgtgaattgtttcaacattatgaagggttcctcttggtaagtggcagaaggagccaggcttaggtttgaagtgagactgactttattcccttcttcctccttacgtagctctggatgccgggcaggttggtttggcactgtcctatgccctcacgctcatggggatgtttcagtggtgtgttcgacaaagtgctgaagttgagaatatggtaatatttaccttcacgttctttgccttttcaatctccttgccattaaatggtataaaagccattcttatgtgaaatattaaaactgttatttttacatctttggtaacagattttttttaagatccttcctccatctgtttaaagttaatgtaaaataaaatatatacatctttttctgagtcttatggttgctctgtcagcaggttttatattcatcacaagctttttcagatgtaataaatgtctctgtaggagggaggttctgaaattctagagaggatataagctaatttcttagaagcctgtttaattttgtttcttaacgggtaattcctcattcctgttaaaagaagacttcagtattttgaggttgtttacatttaattaataggtctcctcctctcccagttctagcgtttactctcttatgtgaagaacagaagggaggaaggccttaactttgctggtgtgccttcttggtacagaaagcctcctcttggaatgtgctagtcaaagggtattagtttatggtggtataggaggctttaatcaatgttttaaatatttgcaccttcccctaaagagagaaaagcaataaacataaaaatcttttcattcttctcatagagcaaaagttgagtaattattacagtgaggtttcacgatcatccagtttaactgacctatatcaggtgatccttctatagcaaaagattcttttttggggggtaggggtgaggggacagagttttgctcttgtaccccaggctggagtgcaatagtgcgatcttggctcactgcaacctccacctcccgggttcaagcgattttcctgcctcagcctcctgagtagctgggattacaggcatgcagcaccacgcccggctaatttttgtatttttagtagaaatggggtttcaccatgttgaccaggctggtgtcaaacacctgaccttaggtgatccacctgccccggcctcccaaagtgctgggattataggcatgagccaccgcgcccagccagcaaaagattcttgattggtggctctaagtattcctttcctttacaaaattttcttgcctttaatacagatgtgagaagtggataaataaaatctaagcattcatttctctcattcttttaacctaatgttgaaggaagtggttgtaagtgaaggtgttacacaatgatgaaccaaatttgtaagtcatcaacatcctcgtctgtctcctgcttctctccttaaccaactatgtatgaaagaagaacatttcattgacagtctcttaacatccataaatgacaccctccattcctaacccctcgggatgtcatatttctttcagatgatctcagtagaaagggtcattgaatacacagaccttgaaaaagaagcaccttgggaatatcagaaacgcccaccaccagcctggccccatgaaggagtgataatctttgacaatgtgaacttcatgtacagtccaggtgggcctctggtactgaagcatctgacagcactcattaaatcacaagaaaaggtttgtttaaagcatcttgcctcttctcaatttcagaagatttagtgctatgtctgcttgttgtcttccttgtggatgtgtgaaggggatcagtgatacgtaggttaacctgtcttggaaactaaccgtggaatgtggataccaacattcttcctgctgtgaactgctttactgtggttggtgggccccgggcctcagggctggagcttaacgtgacccaggatactctgtttgatacctaattactcatggatttttccaggaagtcaactctggctttgtgtcaccaacactcctatgtctaattctgtcgatttttactttgttgcatttctcaagtccttctcttcccctccattgctgcagcttctgttccagcctttctcctcctccatcctttggtcctgtattagtctgttttcacactgctgataaaggtatacccaagactaggcaatttacagaagaaagagaggtttaatggacttaaagttccacatggatggggaggcctcagactcatgatggcaggcaaggaggagcaagtcacatcttatatggatggcagcaggcaaagagagagtttgtgcagggaaacttccccttataaaaccatcagatctcatgatacttattcactatcatgagaacaccacaggaaagacctgcccccatgattcaattacctcccaccgggtccctcccacaacatgtgggaatttaagatgagatttgggtggggacacagccaaacattatcaggccctttccttagtctttcttgccttcctttaacctgtgctttgctttccctccccatccctttcactgcaaactctttctttctgaaacagtttgatcacagatctgatccttacgtggccagctccttgcctgggtgagcagctgctgcaaccttaatgagccccaggcccaccctgacaggacctgtctggctctcagcccccaagggaagacccagatcccatgaccccatcagtgctcagaaatcagacccccaagctggaggcagtaaaggcaccagagactcactcaaagtcagtgaaaggaaaacaaggagggacttgggaggctgtgtggagttttgtgagctggttttgcaggtatctaagtctgccagcaatgtccctttcacatgtgtcctggggcccttggctaggactaggacagcctcttgaaggaactaaaccagaacaaacaagacagtagaatctcttccccttcccacccctctcctcacaactcccaatatggacacacatcccctgcactcagggtgccctccttctccccaagcacctgtctgccttgctcttagtgtgcacccttttcagtcagttcaagcatctctgcctctttgaaactatattctccacatcatcttatagattcttttttcgagacagagtcttgctctgtcgcccaggctggagtgcaatgtcacattcccggcacactgcaacctccacctcccaggttcaagcgattttcctgcttcaacctcccccgtagctgggattataggtgtgcaccaccatacccaactcatttttgaatttttagtagagaccaggttttgccatgttggccatggctggtctcgaactcctgagctaaagtgatccgcccaccttaacctcccaaatcatgcctgggattacaggcatgagccaccatgcctggccagattctttaatgtaacatctgtggcccacccgtgttcataacagcattatttgcagtgagcagtaggtggaagcagcccaagtgtccattgactgaggaatggaaaaacaaaatgtgatacgcacgcataatggaatattatccagacttaaaaagaaggtgattctgacacatgctgacatgtgtgattctgacatggatgagccctgaggacattatgctgagtgaattaggccagacacctaaggacggtgctataaggttccacttacatgtgggtacctggagtagttagtcatggagacagaaagtaggatggtgggcggcaggggtaggggaatgggcattagtgtttaatgggtacagagtttcagttttacaagataaatggagttttagagatggatgatggtgacggttgcccaacaacatgaatgtatttaatataattgaactgaacattttcaagtgattacaatgatcaattttatgttactttaccacaatttgaaaagtacataaagtaccttttgtgtattttaccacaatttttttttaaagaagatagcacgatggcatgatttataattctgggtcagcatctcacagtaccctgagcctcttaaagtcagggagcattttatattcgtctctgtacccccagaaaatggcatgctgcagggcacatggtgggtgcctgtgagagtgagggatatgcacatacaaagaaatcggtaacaaaacacacacgacagctcccgcaacagcccgttctctgggtgtcagtgttagatactttcggaactgctcttttcagctcttcccaccacagacccatttaatgggctatagtcacaattgaatgaatgatacccttgtgccatgaaaaataaatatacagcttcatgcccagaagatacccagggaaccagcaaaagctgattcctcattatctacccagcatccttgtgagtgtgaagaaggtggagaccactctgcaggcagcatcagctgtagctcttgctgaaagcaaggtttctcagattctgttcctgatggggccagggggatgtttgcttactctcagacaatgtgttattaggtcctacctgatcaacatcattctgttagtttggccacgttgtaaatttctcttgtagccataaaatatgaattatctacaaacctctgttgtacacattagaaaacaacctatatccccacattgatatcgttccatcttaaaacccccccaaatcataggattacctgagatctgaaatgtgggagggtaaattgaatttgaagactgaattatagctacaaccacttggcttttgagacagagtctcgctgtgtcatctaggctggagtgcagtggcgcaatcttggctcattctgcctcccaggttcaagcgattctcctgcctcagcctcccgagtagctgcgattacaggcacccgctgccatgcctggctaatttttgtatttttagtggatccggggtttcaccatgttggtcaggctggtcttgaaccccgacctcaagcaatccacctgcctcgacctcccaaagtgctgggattacaggcatgagccactgcgctgagccccacttggcttttgatttgtgtcctggttcactcacagtgtcacctttagcttcatttgtgtattcaggcaacatcgtggtgagttggttccactttttgtgtgtatattcagggttcgtctcctccacacctgcctgcagccccaggatctcaggcagtccctttgctgttggagctgatggagaggggcattgtttccagtggagatgtaggaatgtgtccacacagcagaaacagggcttcattctctttcaattgcttcatctgctcagatttcctggacattataacaaataggaaaaagtaataggcgctaagtaggtttctaattcacagaagaaatagcaagtaaaaaagaatgaaccaaaatgaggtatataccaccctagccttcctggttagattccaaacactggctgcatttttcatttagatggttttgtggttgatttaatcattttagagagtactgggccattttaaagcatttttcagctctagaggtagattgattttggtttgttatttttttttccttgctcaaagctattacttggataatacctttttacagatgtgtactagaccttgctatagtgtgcaaaaatattagtttcttatattctctccttttttacattaatgtttgctgagaaacccctcctctcacagccagattgtcccacttgccctgcctgcttgctcatctcaggggctgggatcagcatcacctgcctctgcttggaaacatgttagaaatgcagactgtcaggcccaccccacccttttgattaaaattgcactgggacaagaaccacccccactcctgcccctgcattaaagccgttgctctccggtaagcaattttggatgactaataatctgtgatttccaagaaacttcctttgacaacttgaagtggagctcgtggattgccccagcccctcttgtgactaaacatgagactctggatagtcctgggccaagtgccaccctacaggttttttgtttttttacttttatattctgcaaattatgaatttacattacaatttaattctgtgtgattccccatttatgcattcatttgcacctttccggtcatctctgtcttctatcacagttttcatcccaccatacagccttccatgaatagcagtctctgtcctcataccagctcagcacagcgatgtatttgagttccgttcactactgatgggatcaaaatgggtctcactgccccacagtacactaggtctgtctggcctgtttcccagttgccccatgtccaacgtagctgcaggcttctctcccagcctcttctgtgggtgccagttcttcctgtcaacagctgtaatccaccctaatacaggtactgtcttggctcacagtagtcagcttcttgtcctagccaccttcttatactcacgcatgtccacagcatgcattaaatgtatgacaataggaccagtatggcaggccagtgcctttaaagacaaccacacttctccccgctgtctcccttctagctacaccaagggaatacagagccaggctatccaagtgattgggaggccatcggcagaatgggcaagaggcaggcagacttgggtttcagtcccattccatcacttaggggctcagtcatttcaacagtttaatcaatcttactaagcctcgatttttctcttttgcaaaatgcaagtgatagggcctagccattagagttttataacttaaacaagataagaggtgtaaaacacctagcttattgtatacctgaacaatatggcaatagatttcccataaatgtttcaagcctgagttaaatgcttaactctctgggggatttctggttttttttgcaggacaccacaggtgatacaaataatacaaagctaattccaatataggccctgcccacagcacctatcgcctagtagaagaaacaaagtagtatataaatgcctgctccgtaagatagaaggaattcgcagattttatggctgtttagaaaagatgttacgacagccattaagtgtgggagaaatccacacgaggggacaagtggaggattttaaggcaattacacatttgaaacagactttggaaggtggttaggatttcagcaggtcgaaatgcatgtgaaaggcacgatggcatatgccaaggctcgatgccgtgatttgatatgaagaattaggcatctctgagcatacaagggcatgaactaccaggtgaataacacacatgtgcacacttagtcctcacagccaccccgcaaactcaatcctgctcatggagctaaggatggaaaggttagttgggactgttttgtagaggaggtttcccagtgtggagtgccaggcagagagctgtacttcggaagtttaatctgagaaatgagtgcacggggaagacgctgaaggcctgaagccaattgattttatgtactgctggcaagatgtgatggggcaagtgattccactttgtagaatcaaactaatgttgattaaaacaaagttataataccctggttagtgaatttgcagggatacaggtgggagtagaaattggtatcatatttctggagggtagtttggcatcacttaacagcctcctttgaaaatgttcatacctgttcctcagcaattccacatctaagaatttattttaagaaaccaattaaggttgcttgcaaagatgtagcttcaaggatatttaacatggtattatttacaatagcaaaatattggagcctaaacatccacaaataggggatttgttgaataaataatcatatatactgtaatattatgtagctactgaagtaaatacttttattaaataatagattataatattctgtgcatattctcattttgcctaaatatatgagattatatctttaggaacacagataactcacactcaagttcagaaagaaaaggtattaacatgtgacaaggattctgtcagattgctggggttgtggccagcatttatttatttttcgaattcacttgcactgattataactagcaaaagagtttttgtttttcaaatgttaatgcagccttgcactgaggtaatggctgcagaaattaaagtgagggtattgagtcaagaaacagaacaagtaatatttttagtgcttggagttgagaaaacctgggagatgggtgttttgagcctgtgaacttggggaagaatttattagattaaaatggaggagttagaagcagcagctgtttggaggggggctgttgggtattaatcatgttgagtttcatatatgaagagagatccaagtacaaatgtctaatgtttggccaaagagaccactcttggcccagttggggaaacaaaaagggtcaattgtaaagcaattaaaataaaactaagtgtctctttcgtgttatgaatgtaaacttactgatattagtgatattctccagaggatttggtgaaacccattggtgacttatgaaagacttggagactgtaattttgatgactttgaagagaactaaccagagccaggttttctttggttgccttttgctgattatatcctcacctgagtttggagtgcctagtcttatggttgtaggcagccctcagtgttccctacctttgagggggtccatcctggccatctactaataatggcctacaaatgtccaggtttgcacagatggatcagtttcccatagagctgataacatgagtgtccacacattctcaaaaacacagcatttgtctatgtctagatacgtgctgatttactgagaaacacacataagccccacacacacacacacacacatacacacatacacgtgtgtgtgtgtgtatgtgtgtgagagagacaaaatatagtcaggtatttaatatttggaagtttctctaccaaagaatgtgtcatcttaaatgatagaagtctggaaaaatgaatacctgtttatgtcacttgtgacacctctgtcttgaattaatatccctgtgaaattatctcagaaattcaattggtgtgtgtgtgtgtatatatatatatatatatatatatatatatatatatacacacacacacacacccggatgtacctatgtgcagaaaatggcccacctataaagtataaactaggatttaccataaggtagaatatgactccaaagttaataaaattagctaaagccactttttaaacatttacatttttatattttgtacatgtatctctttaaagataaaattccttgtggaaatgccattattgactttacagatatggaggtgttcaaatgaggtaatatgtcacatttccaacacatacccagtgcccagtaaagttttgcagtgagttttaaaatttattaaataatggacaaatgattgaaggcatgttttatgtccttcgttgactccagatttctaaataaggaggatgtcatttcttgggaagttcccaccaggaaatttgcagttgtgcaaggtcattggtgcagaggccagtttctgcatacagatttatatgcacacatgtgaaagccagtttttacaatatagacgtattgcccccacctttttaccagcattttattgattctttgatcgtattggcagtgcacttcatttctctctgtcttggctttaatagaggagtgatacttgacacaaatgtttctcaaggggcaattgtaagtattaattagtttgcagcatgccttttgaactgtgcagatgaaaggccttacgtaaatagcaaatgttacttgcgttgttgttgatctcattatgtgttttttggctactggttactactgtcttttaagacattgcaatcttcacttcagaattttgaaacattttgagacaaaatataggcagatatttaatatttggaagtttctctaccaaagaatatgttatcttaaataatagaactctagaaaaatgaatactcgtttatgtcacttctgacacctctgtcttgaattaatatccctgtgaaattatctcagaaattcagattactcagatcctgcaagcaaagctaatttaaaagttgccttttcatgggccacttaggagactgttgacttttcaatgccagtaaacagattctgttattttcaactcttttttagaacagtggatctcaaccaggggcagttttgccccagaggacgtttgtcagtgacatttttggtggtatcattttgggagtgtgctcctggtatctatgcagtagggtccagggatgctagcgaacctcccacaatgcctggggcagcttccaaaatgaagaagtatccagctcagaaggtcatcagtgctgaggttgggaaactcttagactacactcaatatagaatgtccttaattcttcttcaaaaaccgaaagttttctcctagttttgctgcatcctgtgatttttttttttttttaatcctgccgcctggatctctctgtaggttggcattgtgggaagaaccggagctggaaaaagttccctcatctcagccctttttagattgtcagaacccgaaggtaaaatttggattgataagatcttgacaactgaaattggacttcacgatttaaggaagaagatgtcaatcatacctcaggtatgcaagtcatagcgtccttacctgccccttttataagagctactatgtttaattgcttttactcttattgctttttttaattggatgaaaggattgttttttttttcacccaatagagcatgtttttatgagcagatattttcaacaggtattttcatcagatatccagctttgttcatttctctctctctgtgtgtgtgtgtgtgtgtgtgtgtgtgatatttaataacttacgcagatagatttctgtactaagatgccacagttttatccactgataaccataaagaacaaaatgatgcattgtttgtttagcactggggaggtttctatggggagatgtggattttaagtgtcttaatgttggaattttgctgtaggaactaaagctaccttctcaaaggtgattacctccatgaagggctttctgtgaaactgtgggctgtgagagttaaaaaacttatagttggctttgtggtgacttttagaatctagctcttggtgaatgattttaaccaggaggttgttaaagaatagcaaggaagaacatgagagacggaattccatctctctgcacttctgcttcatcttccttacgatcaccattgtgagagtgtgtggtgtatttcacacagacccagtgagtgtttgctctgatggtggagggttaaattggccatcctttcccggactctgattctattttcttttcttctcctttgcagaagtgactctcaaggagtgttctagagattggattatttgtacaataagagctcctgtcattgctttggttcatatttaacataaattcagaaagtattcattgagtaattactattctccaggtgtatagtcatgagcaacatagaccttgtccccaccggcatggggtctgcagctgtggggcctcatggcttccatcggacctcacagttccatcctgtccttcactttaacacctccacatattcaactccagacatggctgggttttttgtttgttttcttttaatgtgggttttttttttttttaacactctatagtcattgaggggagctgaggaacacacacacacacacacacacacacacacacacacacacacaaacacatattctggagaagagaaacacagagaggagacaagagcaaaacccaggcagtaatgagctttctgggcatgtggatataaacaactcttcaatgcctgtttagtaggaagcatagagaacgtgccaccggaagggaaggagaatgtgatttttatcttagaccaagtacagttatggctatcctagcactgacctctaaaacaattggaatcacgcttaagtaatttggaggatgtgaagaaattggaaccctgtgcactgttggtgggaatgtaaaatggtgcagccactttggaaaacactgtagagattcctcaaaaaatgagagctaacgtgatccagcagttccacttccagaaagaattaaaagcgggatctcagagttttgtacatccatgatcatcacagtacccaaaaggtggaaatagctcgtgtccatcgccagatgagcggatgaataaaacgtggtctatccatacaatgggaaattattcagctttaaaatggaaggaaatcctgacagtctataatgcagatataccctaaagacattatgctaagtgaaataagccagtcacaaaaggacagacactagatggttcccctaatatgagatacctagactagtcaaattcacagagacacaaaggagaagcgtcgtcaccaggggctgagggaaggtggggggttgggagttacattatttcacataggacttcagttttgtcagatgaaaagcgtcttgtgaatggatggtggtgatggctgcaaaacaatgtgaatgtccttaagaccactgaaatgttgactttgaaatggcaaaagcagtaaattttatgctatgtgtattgtaccacaatttttatttttagtttaaagaaaaaaaagtatccctttcaggataaaatgggaagaaatgtttagcacgttagattccctctggctattagaagcatgacttagtgcttacagtagaaaatgagagtataaattctcaagttttatattttggttatgcccatctcaaaaatgggccaaatgaggtttacttagcagagataatgggcatgtctgtaaagtgcttttatatccttggatgaaaggttctaggaacgtgccctgcattactttgaatgaattcttaataagaaatagttgtgtgcttgtgtacataaaagaactctaaataaagaagtaacattagatgattcttggctctgccagtaatgttttggaagcacatctgagcaaagactaaatataccttgacatcaccaggttttggttcagttccataagtttccaccctacttttgagcaaatgctctatgtatgtagtccagggagcatgcttacaaaacactgctaagctttgtatccatgtagatcctgatctccaagcattgtaaacagagagactttcctttttaactttgtatggctttgtctccaaggctcaatgttggttgaaaaaaagaaacatagtctagagggactgtgcaatacttaatgcgacccaggaaatcattcagcagactgcctgggatagaatctttcagagcatcttctaagcgtcaacacgacccacatttttattccagcactgcctgatagaagtgtgacctcaatgaagtcacttagcctccaagcttcagtttcctcatccttaaaccaaacctagtaattactaacttacagatttgttgtgaagattttactagatgagaacatgtttgtggccctactctgggttctgaggaatgctcaatagtaactatttctaattaaggattggggtgcaggcctttagggcattattgctactcgctattctagaaggacttggctcattaacttctgtttctatttttgtgatccttggtgaattcctttaaccaaattgtttatgtaaatttaaatagtgaagcagcaacaaacaaaaaaaaatgtgcacaataaaagcctaagagagaaatctaatgtttttctcacaaggaacaaaaggtgaggctatcactttgttttctggctttcccccaccccggtcttagcggcattcctcaccactctcagtacccctctaatgctttgcatttcgcgagcaggcagccgacactggttctcagccctgcgtgagaacaggggcttgtccctcttagatccagtgctttagtgattgttgcgtcccagacaagttacacaagtagtgagaattcctaacatttgcagaatccttaacatggttatcttctttccttgccatctcccacttcgtcctcacagcaattctgtgtcatcctcatttgacacattttcaaactgaggcacagagagcttaacccacttaacaagtaaacagcagagtcaggattcaaatggaatttacggcgaatctcaatgccagatcctgagttcctgaaccctctcctagggactttaaacccatgttggctggcgcagtccccgatcagaactctgctttgcaacatgatttagtgtgggctcgtgcaggtgcacacacacgcacagaaacaaaagtctcacaacacgatattactccatgcttctgcgccctgatattttctattatatccattctattctggttcatataaaagacataaggatggtcatgagtcacaaaagtgatttcatgatccattggttgcacctgccatttgaagaacagcgtgcctcactgtgctgccctgcttggccgggctcctgctgcctggcagcaccgtgcaaggagcctcatgacacagtgattgtcactgcagccctgcagggtgtgtcaagttagccccattctccaggaaggaaactaaggctcagggagattaataacttacctggagatgaacagctaataagtagtagaatcagaactcagaactatccaactcaattttttttcagtaagtatttgttggacagcatgatatctcatcagacattttactcattgtttttcttttctttttctttttcttttctttttttttttttttttttttttttgagacggagtcttgctctgttgccaggctggactgcagtgacgccatctcagctcactgcaatatctgcctcctgggttcaagcgattctcctgcctctgcctcccgagtagctgggattacaggtgcgtgccaccacacccagctaatctttgtatttttagtagagacagagtttcaccatgttggccaggatggtctcgatctcctgaccttgtgatccgcctgcctcagcctcccaaagtactgtttgtttttctgtctacccaacttacaaaaggttcccagaagccataaccaaagagagcaaatatacagcaaagtcaaaaggtatcttttctttgaactttatctgtcatttggacagttaggtcattttgaaagactgaatcatttgtgatttatttttatttttatttttattttttccaaaaccttaagtgacactaagcactaaaagaaaatcattttggaaacagagtgtattcacttatgtgtcgtgggctagtgagcgtcagaagatcctccaagccttaccttgtgggagctcagagccctttttcttccgaggcctcgctggctgcagagggtggagaaggctggagacttgaggttgcatgaaggttactggtctgcagtgcagaaagcatacacccctcttcctcagaagtgagtggaaagccaaatggcttgtgtcaccacacactgatgtagggaatctaggaagtttgggagcaaacacagcaaaagcagaaccaagcgctgtttcttcgaatggccatgtttgggcaagtctagcctgcatggcttcctggggttgtgtggagcacgagtttctgtgttctctctcttcctggcttatccctttcatttatggttcagggtcctctgtcactcttgaccacaccattagcaactcaaattcgtggttaggattaagcagcaaggacctgggaaagaactggggcacagaaatgatgacatacatagtcaggggccagtcctggagtcactttaagaaacaaatactgggccgggcacggtggctcacgcctgtaatcccagcactttgggaggccaaggagggtggatcacgaggtcaagagatcaagaccattatggccaacatggtaaaaccccgtctctactaaaaatacaaaaattagccggacgtggtggtgcgcatctgtagtcccagctgctcgggaggccgaagcaggagaatcgcttgaaccccagaggcagaggttgccatgagctgagattgtgccactgcactccagcctggcgacagagggagactctgtctcaaaaaaaaaaaatactgaattcttaagaaagtacccctcaatttgtattcaaaatttcaggaagaagcgaacagtgaaagtacttcctaaataatttccctaaacagaatagttagccgaaatgtatgcttcctttgtgttcatgacacagggtagttaagtgcacttcccaaggagaacaccaaggtgatactataactcagacaagagtttgcttaactgaaggatctggaaaaatggatttcaaaactttttttaggatggattatttactcctccaatcctactggcacaaataaatgttttcaactaaagagtaacttcatgcaaattcaacatttatgatagcaccctaacggttggcatacatcaacagctataatctttgttaggattaaacagattcatttttcatatttgatggacttttttgtttttctatcaaagcaaaagctaagtagtttttaagcagcccactgctcagacttctgctatcttggtatttctactccctgaattttcttcagtaagttgaaaaggttaaccagagtgtgtctctttaagacttctttttttattacctgattttctttcctttttttttttttttcttctttttgagaacaaaattcaaagggaaaagaggtaggtatgcagttactagtaaagaaatacaattggattctggcctaatgcagtcagtcctttgtttctgcacactgaagtcttcattaaggccatggaactgctccctggagctggtgacctttttgtatctaaagaagactttacacgacttaaattctttttcctttgttggtgaacaatgttcttttcttctgaaaatggatgatgatcagttcattcagaggctacagggtttttttaaaaaagaagggaaaccaagatttaaagtgacttcaggtgattccctgattcttgacacagggagatgagctgccctgaatcaaggtcttcaggatttgaaatgcacacatagctctgaggacatcaggcagcagcagttgtggctagctactgtgcagtgtatattttaagagagcgaagtttcctggtttgggacaagattagggtaaagtattgtgctttgtcctgctggtttgtaactccccatgcgatttttgtcttggtcccaggtcgttttaagtgtctgaaggttggtggatagagtttcttcttgagataatgagaggcttgtcttccagaagtttatatgaaagctctaggaagactgtaattttcagtcttgcagtcctgctgagggattatcaatttactgcactaaatgctttgattcagagcggccatttttaggtcacgtggtgggttttttttttgctgttgttgctgttgttttgagacagtcttgctctgtctcccaggctgcagtgcagtggtgctatcttggctcacttcaacctccacctcctgggttcaagtgattctcctgtctcagcctcccgagtagctggaattacaggcgcaccccaccctgcctggctactttttgtatttttagtagagatgggatttcaccatgttggccaggctggtcttgaacttctgaccaccagtgaaccacctgcctcggcctcccaaagtgctgggattacaggcatgagccaccacacccagcctggtcacatgtttaatatcagcttgtcttatgtgagtaatgaggacaaaattactactcagtatggcgcaaagatttttaaaaagtatgacctttaaaccctaatgaaaaacaggtttgatctggtgcttcatttaaaataatacgttgaacagaacattggttttgctaacaatggaggttaaaactcgtactaaatgacattttaaaatatataccatcaataaatatgtacttaggctactaaatcttttacattttacatgaagattgtatgtttaccataaatctctactctgaaatgttctgcctgcagaggttggaattttagagttgataattacaaagagtaagtcaagtttttatcttttaatctgaaataaccagaatgatggttattcccctcacaagaaattcccaccattgtttagatggttgttcaggttttggtcttcagttgggtacttttaagacagaccttacctgtgactcttggaatttttcagttccatttggtaattcagaaacatcatgtgaccagtgacttttcagtgcttttggaaggatattggccactttatcagctttatacacacaaagtgcccattttaccgtcgtttccatttttgcattttgctgaggacttatgtttttggtggcaccctgtctgccttctacatccatttcttcctcaccagccttaaaacggagacgatagggaaagggatgagagcctccctgggtatcatttttctttatggctggagaaaaaagaagtctaccacctttatctctcttctcaggcttttgggaagtgaggaggaacagtcctgccccaaagccaggtgagatttgaggccagtggttcccttgagcatttctccagtacctgtggaagagtctcaccttctcttgttcccacatctgtgcatccccttgttctgcccctatccttgaaagcagttgatggggctcctatatccttatggcctggcttattagagccttccagaagaaaagtttgtgtttttgtttttttgttgttttttttttaagatggagacttgctctgtggcccaggctggagtgcagtgacggaatcttggctcactgcaacctctgcctcccaggtccaagtgattctcctgcctcagcctcccaagtagctgggactacaggtgcccgccaccgcacccagctaccagaagaaaactttcacacagcctacctaagcttatgttcaagagtctctcttgaaatccaggaagaggctgatattccaagagtgatttaattgtgggatcctcctgaagcagatgaataggaacagctatttaaattgatgtaattttattatgacctccttcacagtggttttcaggtaaccctgctttcttagttaataatgaggttctgtgacccaggtaaccttgatgcacagatgagataatgtggggattcactgatgcaaaatcagaggcaatcctttcataagtagaggtgcctctggccccagttgtttagatctcctttggccaaaaaaaaaaaaaaaaaaaaaggatgtcccattctgacattggagagattttttttttttttttttgagatggagttttgctcttgttgcccaggctggagtgcaatggcacgatctcggctcactgcaacctccacctcctggattcaagcgattctcttgcctcagcctcctaagtagctgggattacaggcatgtgccaccatgcccagctaatttttgtatttttagtagagacagggtttcactatgttggtcgggctggtctagaactcctgacctcaggtgatccacccgcctcgacctcccaaaatactaagattacatgcgtgagccactgcgcccggtgagagattcttaatcttggaaaactgttttgccaacggagaaaataatcctaatttattctttagtgcaaattggaaaatgcttaataatttggctttgaagcacaaactttaatcatgctgtcggtattttccagtattacatgattgatagttaatttctatagctctattcatgtagaccctcgaataattatatccttatatttcatgttaagctaataatatgaggaaaacagttttaaacatcaggcctgtgtttttcattttcttcttaagatagcacattgcaacagttttgttagtgttcagtggtctggaaggtattttggagcacgctttgtacagtggaacattaatagatatgttgttttgtaaacaggcatttgtaacgctataattattatcatgaattttattttttggtatcttaattctattgttgatgttagcattggaataaaatgaaaaaagagtctgtggtaatgaccgtgactattttgggcacttaggaacctgttttgttcactggaacaatgaggaaaaacctggatccctttaatgagcacacggatgaggaactgtggaatgccttacaagaggtaattgataaaatgtaattatctttagtctgttagcctcagtatgtgtatatgtacctttacagcattgcaggaaattaagaggagcttagcggtttaactaactttgttcaccacccaggagatcattgaggatgtggatatgctataatgtgtatactgatgatgatgaaaaccaaaaataaaatttccctggttctcattttaattttcttcctgttgtccaaaacagtttggtgttgttttatttgtctttagcaatgcgttaaactagaagttgtatttatgagttgagatcctattagtgactaagttactctgcaccatttattttactgctctgttcttagggaatttctagtaagggaagaccatagtcgtttttcattaactaaaagatagatcatatttatgaaatgctttaagttttataagaaagtgtttataaaggtaaattatacagttggaatgggataataattatttattggcaaacgtgtaattttaatgcagataacagaaccctgcagcctctgctaaggttttatactaatatgttgatttctagaggatttttctattatttatgtggttcctgttgggccacttcttgaaattttctcacccttgcatgaaaaaaggactttgactattaaggtgctgttggtttgtgtattttaacactgattttctgtgttcagtctagttctgcaaatttgtgccagtctacttgatggcagaaaccatatcataaaactggtaatccctcacaggacctagtttagtcttttgcttttaaaaagtaagcatttaaggctgggtgcagcggttgatgcctgtaatcccagcactttggaagtctgaggtgggtgaatcactggaggtcagaagtttgagaccagcctgaccaacatggtgaaaccccatttctactaaaaatacagagattagctgggtatggtggtgtgcgcctgtagtcccagctactcaggaggctgagacaagagaattgcttgaacctgggaggccaaggttgcagtgagccgagatcgtgccactgcactcccatctaggcgacagagcaagactccgtctcaaaataaataaataaataaataaaaataaaaattggccaggcccggtggctcatgcctgtaatcccagcactttgggaggctgaggcggatggatcacgaggtcaggagttccagaccagcctggccaacttggtgaaaccctgtgtctactaaaaataccaaaattagccagacgtggtggtgcgcatctgtagccccagctactcaggaggctgaggcaggagaattgcttgaacctgggaggcggaggttgtggtgagccaacattgtgccactggcactccagcctaggcaacaagagtgaaactccatcccaaaataaataataaatattaaaagttaaaaaaaagtaagcatttaataagtatgtattaatatgtttgatctcttcatttcaaagaagtgtggagcctggacaacatggtggactttgtctctactaaaaataaaaaaaaaaaaagaattagccagatgtggtggcatgcacctgtagtcccagctactcagggagttgaggtgggaggatcttgtgagccctggaggtcgaggctgcagtgagccatgattgcaccactgcactccagcctgagtgacagagattaatttccctccattgttattgttgttgttttgaattggtgcatttgtcattgttgcccttccagggatagctctgaaatctttaatttatagatgggttttgactgtgagcaagtagacttggaggcctgacagtttcctgccagtaattcttgtttctgaaggcatgtcattgccgagtccttacacacccaccctgctttccagcaactgtggggattttctttttctaaattaggtcgattacttcacctcctgatacttgataagcaattgacctctgatttcatttaaatttgtgaatctctgtacagtgaaattctaggagagaagaggtgggtacagttaactgtcaaatgtaaagaaagataaggcaatcctgtgcccctaaactctcaggacaggtttaatagtgaaattgtgacacaccctaaaagaacaagaattactcataaagtgtttttctatttgtttcagagcttgagattccttgtcacagattctcagagagcaaaagtactttttagaaacacatttctctatgaacagtgaagaaatgttaattgggagatgatcctatcaaaaaccatcatggaacttgactgtaactcatacttatttcatttgttatagccaaaattaaaataaaatttagtagcctctcaagaattctagaaatgatgaggtggaagacgtggtaggtccccctcagaagtgaaaaattatcccatcattgtctttctctgggaactacttctttatggcattgtaggtttttctgtgaatgatttggaagagttactaaaaattagggtacaacattgtatttccagtgtgattccagctgtttttaatcattcttatattctgacacctgacctaagaaagacaccagagcatttacattgctcgtttgggggtaatgagacaaagactggaggagagtgttttcttttctctacagttttcctggattttccaaatttccttctgggtgcttgtattctttttaccttctagatggtcaggggaaaggctgagcactcctaacaaatgaagcattgtgagtttttcacaacaagtttcatgactacaagttgatggaggctgggggcattctgataggtcaggaattcttcccctggggtccgtggagtctgagggtcttctcgtagagaattccaaatcttacttcctggtgattgtaaacgtgaagttatgtgtgtgtgtttatcttgagagataccacacaagggattcagcaccacgactctggtgccattcaagtttctctggacttctctgtcacattctgtctctctgctgtctccatggttttcatctttcattgatatccagttcagaactggataactcatcttgctctttagtaggaaacctggtgtcatttggaaaccccctttaaagcagacaaaaaacatagtcacttggtttataaatgaggccaaactggaaatgggaacccaaactcagagggttggcttgagattaggacagcactgtcagttttttcctctttaaccacttaaaaggtggtttaaccacataaaaaggaaagatgccttttatttcttggaagttttttttatttcttcttacccatgatcccttggaaagggtaatacctgacatgcaaaagaagttcgggcatctggagggagacagtcctatggatgtggttgtgtcatcttggttatttttttatttatttatttttatttatttatttatttatttgagacagagtctcactctgtcatccaggttggaatgcggtggcacagtctcggctcactgcaacctccgcctcccgggtccaagcgattctcctgcctcagcctcccgagtagctgtgattacaggtgcctgccaccatgccggctactctttttgtatttttagtagagacggggtttcaccatgttggccaggctggtctcaaactcctgacctcgtgatccacctgcttcagcctcccaaagtgctgggattacaggcgtgagccaccgcgcctggcctatttttatttatttatttatttttttagacagagtcttgctctgtcgcccaggctggagtgcagtggtgcaatctcagctcactgcaaactctacctcctgggttcaagtgattctcctgcctcagcctcccaggtagctaggattaaaggcaagccccaccatgcctggctaatttttgtatttttagtagagacagggttttgccatgttggccacactggtctcaaactcctgacctcaagtgatctgcctgtctcggcctcccagagtgctgggattacaggcgtgagccaccacaccctgctcgttttttggggtttcttttctaatgctgaaagttatcgtaaatactgaaaaatagtcagctgtaaatggaagaaagtttactagaattagtgccacttcgggcccctaaataagagcaactctgtaaatataacgtaagtaatgattaaagatggaagtcgtttatgagaaaaaagtcaaaagatcacacagtaggtacaactaagaaaatgaatcagcagcacgttatttctgttaattaaaaaacgactttaatactgggatctacaattaagactaggttatatcatgttggaatagtggagaaattatctaatcatgttcaacattgatagaattgctgttagaatacaaggatgtcttgtattcaggacaccataagacagaaatctgcacatcagcagtgtccacatcctctgggccttctattccccacaccttgcacctccatttttcccaggcctgtattgcccagaatgggcttccgctcgcttcgttcacacttagctgtgttcttgttaaaggttgttcccatctgttgagttgctgtttatcacatttcagtctctggcatcagagacttcctttatgaaaagtcagaaagttcaaagaaacatggaaacagaatctgacatccacatgagtctctttgaggctttgaaaacatttatgatgatagaaatgggctgtcttagaaagttcagttcattattttcacttttcctgtagtttcctattttttctaagcttcaaaataacctgatacattgtgtttgaaatgtatagtttcaaatagtatgatttgattttgttttcctgaaattacaacctttattaaatgtagaaaacattaagttttctatattttaaagtataatgttatgatatcttggagccaattaattttataaggactgtttcttttacaatgacatttagtaagaaaattgtatgtaaattctatttctttgtggatttactttgtaatttataagaatagacatgtcacaaaatgaggtatccttgtgacttcatacattcaacagattatgtgtggggaggtttttacataggcattgtagactctggagctatagcagtcatcaagagagataaaatccctaccctcttagggcacaaattcttgtatggaagatagaaaataagaaaatgcatatgtaatataatattaggtactggtaaatgcagtgaagaaaactacagcagtgcatgaaaagaactagctgactgcattattaaaaataggcggctgggcgtagtggctcacgcctgtaatcccagcactttgggaggccgaggcgggtggatcacgaggtcaggagatcgagaccatcctggccaatatggtgaaaccccatctatactaaaaatacaaaaacaaaattagccaggtgtggtggtatgcacctgtagtcccagctactcgggaggctgaggcaggagaatcgcttgaacctgggaggcagagattgcagtgagctgagatcgcaccactgcactccaacctgggtgacagagcaagaatccacctccaaaaaaaaaaaaaaaaaaaaaagaataggcagtatttcattgtccaggaaggagcaaaataaacaaaaagaatagatattatctattgatctcttacttggtaccaagcactattgtaaatgctacacatactgactgattttatactccaacaattttaggagataaacatcttcaaaataatcttagtatggtcttatttacaagttaattaggaagctaagatagagaaagttcaggaacttgcccagttggcagagccaggcaggactcatacccatgctgtgtgtcttcaaggctccatttttttattttaaaatgtccaaatcacagaacagtcaaatgaatagtattatgaacatacacatacccttctccaagattcaccatttgttaatacggtattttgctacatttgcttcctctcttatagcccttgaaagtaagttgcagacatttccatgaagttgcagttcatccttaaatatgtatgtgtacctcctaagaacaagaacattcaactacatgacataatacagttatttacctcactgaagaaattgaagagtaatgtaataccattgtttaatatattttcaatttccccagttgtcactcttagtcactgtgttccactgcctccattgtctttttctcagtgctaatacttaaccataacttgaatgtatgataacactacagagggccttcacattcatatcttttttttttaattgagacagagtcttactctgtcactcaggctagagtgcagtggcgcgatcttggcttattgcaacctccgcctccctggttcaagcaattctcctgcctcagcctcctaatgggattacaagtgcccgccaccatgcccagctaattttttttgtattattagtagagatgggatttcaccatgttggccaggctggtctcgaactcctgacctcagatgatctgcctgccccagcctcccaaagtgctgggattacaggcatgagccactgtacttggccatacattcatatcattctcataaccatccccgattcaatcatgatgacagagtctcagaagacactgttatctgggaaatgtgttcattattcttcacctcacaaccctattcttcatcaagtcaatgtggataacctcaaggagggtcaaaacccagaagaatgatgggttggccccttaatcaagggcaagtgtgagattatttcttcaaatctggctgccggtcttagaaaagacctttttgcacttaccagtattatcaaaatcaactcagaaggaaaagctaataaaaactttgctaacatctacttttgatcagttccatcacatggggtataggtctgtgagtatgtttcataaaaagattactcagcaagtcctcttctttgtaatggagagggtttgactaagctgacatattccatcctataattttcagggtaacattttgcaccacgagccaaatcttacacttcggattttaatttcctaccttgcatgctaatgccaaatatcaataccatatttaatcttaactcaaaattcctgtttcttggagttggacttccatcatgagtacaactcaagatcacattcatagaagtgtgcttccgtgtttaaggtacatgacaatgttacccgtttactcttggctttttgttgttgggcattgtagttctgtacacctgcttattggccatcactcatctatctgcttgctgatctcttaattggagatgtattgactcttggttcctctatagctctcaaatgtcacctgagtttggctcttgttctataaaatttctccaaaacaaacatcagtgaactgaaccaccacccaatgtagtatcaaatcatcttatagctacaattttataaagatacattaatatcaacatcatctatccccgtcgtctggggcaagatgttatattgtgtcctgtttttttgtgagttttcattcactgcaaaacatttattagactgtagaaaatgtactgacctactttatagccataggggcttaaacttgggaaaggaccagcccaagaataagctcctgatttcctaacaaatgaggcacagtttcccattgtttgcatttgtatttttttaacttttccagttgattaaaaaaccttccaaaatggtaaagtgcctataagatgatatctttggaggaccatacttcctgcagtaattttctttttaaattttcccttgagttatactcactcgtctccaaaatgtgctttgggaaacttgactcaaccagaaagatcctttcaccttttcttcagactctatattgggagcatgagcttcattttttgagaaacttccttccctacctggaagaggggttcttgttggctgtcatgttggttattggtaagggagttcaggtgctgggggacactgatatgatttttttccaacaactctattgaggtctaatttgcatagcagaaaatgctccccttagaagtgattcagtgattttggtaaatttatagagttgtgcagtcattgcaggaatccagttttaaaacatctctcttaccccaagaaatttccttgtgtccatttacagttaatcctccagccccttggcaaccatcactcttattgtctctctaaatttctgtaatcttttaactaaaaagaagggaattttttttatctttctgtattttacctacagaatacttttattgatcatactgtgtttttcttaatgaaattggcccaggcagtattaacacgtgaccctgcatgaacagactgtgtttgctgatggtgataaaggagcatcttgggttccattgtttgttctcttaagtcagaatatttccgttttgtgttgactctaccatctttctcattgaacattaactagaggtaattcagcctcatgtgtgtgtccacttaagttatatctctcgagagaagggacttgaaggttctaatgtctatgaggcttgactacttccatagcggcttgaatgatagcagtcattcttctttgtacatctacaggtacaacttaaagaaaccattgaagatcttcctggtaaaatggatactgaattagcagaatcaggatccaattttagtgttggacaaagacaactggtgtgccttgccagggcaattctcaggaaaaatcagatattgattattgatgaagcgacggcaaatgtggatccaaggtataaagctgaggtccatgtaaccttgagtccacattttaagtgtgtaaatgggaaacatggaatgattctgagaaatatttctaagtgctctgtttgccccagacataacattttaacatggataaattcattctgaaaaaaaaagaagaaacccaaacgtgttttccagtgtcagagatattattcagtatcccaggagagctagattcctaaaatccactcccaataatcagctttaagcaatttggagggaagacatttttcgttgttttatgaaaattagtaaattactacatagatttttatacttgtttttaaagaataagattgtcctaaaacattttaacatgatttttaaaacattaaatagatatgatcttttttttttaaatctctattgtgaagtagagctttttaagtcttaagtctactttttgcatctttacgaaattaaacttaacttctttgattgcagaactgatgagttaatacaaaaaaaaatccgggagaaatttgcccactgcaccgtgctaaccattgcacacagattgaacaccattattgacagcgacaagataatggtgagtccttcacctgcggaattcctgttgctcccaattatgttcactttttcagtttattccttccttgtaaaacttgatagaaacccctagtaagttaattttctgttaattttggctctcttcccagcagtaattcatatgcttaactacaccctcagtgctactaacaatatatccaatgtatctctttgcatataatcatatgcaaaaatcatatgttaaaagtttaccatgaaaatattccaaatctaagattcagcttgtgatgctaactgtcatactacggagtagtatccaatagaagatcacagtcattgtcactgtcacagttgtttcagcatgcttgatccccttaatgaaagatttaggtttttatatactgcaaggggcttgttgggtaaggttgcagaacttctatgctgttgggacgttcacaagatacgtgtcacaggggaagagatgagaagatccatcacaaattattttcagagagggcctagccagaaaaacaaatgattccaacagaaaggatttaacataggaaatttgttacataagaattggagggcttagaaaatgaagggaaacagtgataattttaggaagcaaggccaggcacggtggctcatgcctgtaatctcagcactttaggaggccgaggcaggcagattacttgaggtcaggagttcgagaccagcctggccaacgtggggaaaccctgtctctactaataatacaaagattacctggatgtggtggcaggcgcctgtagtctaaatgtatcatatagacttcttgttgggatttgctgttaccgcattggtgatagctactccttttattatctaatgcttggaagtgctgtcaacttagaaggtctgattagttagagagacagcaagcaaggacagaacttggcagacaagtcagttggtcactcctaaatctgatcaatcagcttctgaccacataaatgtctagttcacaagcatcttcttgatccatcagcgctgttaccattattgaagtgtgcccattagtttattgctttatataccagtccctctaggtagattttgagaaccttaatttttttctctcttgagtaatgtctttatctaaactctgaacatggttctacaaagcaatttacagttggcccctccctacctttctagcctttcctccctctgttctctctctttcctttgcagtaaaagccacagtcctttagttattgtccttcagttcatcaaacgcagcattcactgttgcggtcatgccctctctacaccatgcacaatggcggcttagactatggtgtgagcagtgaagatggtgcaatggatagatttggagtaaatagcaaagtaaagcaactggactgtgatggattgaatgtgagatttgagggaagacaggggtagtcagtcctggtttctctgtttgggacctgactatctggatgaatgaggaagacccggaagaagtaaacttggaggagggaaaggcaagcattcccttggaggatgtaactgttgagatgaccttgcatttcaacatggagctttccttctcactcccaactccattagtgtctccatctatggcgatctctccaatgatattgggagagcttccatttagggctccctggccacgaggtcatcagtggcatcacaggaggtcctaccaggaggtataaatttaagtaaggagtcttattacaagctctgaattctttgtgagaactattttccaatttttcttaacaggcagtggcaggattcagcctcagggaacccaggagacatgcattctgtagcttgagattgggaactggcctctatgttccctcaacccctagctgaaagcatctcctgtattctagagcttctgatcatcagccagctttcaattcgggggaacaccataaataccattcttcctcagatctttgattttggaggtgttttgttttttttgtttgtttgttttttccccttgtttgctttagagataccgttccagaaaacacatgttctgttctgttattctgaaagctgtgaaaacatagagacaagtgaatcagctgcaaagctcagcactccaaaaggcaggctcagggagtggctggggaagtgacagatgttaatgaaggacataaccaacactattgtcatcatgcagtcctgtaattgcaagtgcttaaggtgtaataattacgttttgttgcattggtgaatacttctccacaaagacggatagatatagttttgtttactgtaagtaaatcaaacaaaaagcttgttgggaaacaactgcgacctaattaatagctttgtttatgtgttgactctccaaagggatttacccagttttggttcattaagcgccatcaatgtgttaagcttagaattttattttatgaagatgttctcccagttttaactttattaaacatggtgtagtcttaatgacagctaatttaatcttcatttgctcagttgccacaaaacagtagagcaagacagacaaattagaaatcctcttttttctaatacgcaccactatctccacattaaagacagcttcctccctgtagtttttaggattagctggttacttgtgacctgttttcctttcagccaatagcacagccttttcctccagtccctgcacacccgtccttacaacgctctggattctccctggtagtgtgagtgaacgaggaataagcgaatctgcagttagagaattcttcgggagtgaattacagagaagcaaaaccaggcctgagaaattcagattgtagctcttttctttgtaggcaatcttatgggtgtataatgtatatctttctttctaaacccaaatctctttttagtagcgtttcctcagagaaaacaaactagaaatcgttctagcagaaccagctggagaaacacaactcaaagctaacctgagttttatttaaattctatgtttcatcttcatggaacttctctttaagaaaccgacaacggccacaattagaacatttcagaagaggaaaaattacttcttgaaaaatatgctgagacatttaattaaagtgttcagggggacaaagaactaatgtgaaggtagaaagcacaaactggggctgggcgcggtggctcatgcctgtaatcccagcactttgggaggccgagaagggcagatcacctgagaggtcagaagtttgagaccagcctggccaacatggtgaaaccctgtctctactaaaaatacagaaaaattagctgggcgtggtgccgtgtgcctgtaatcccagctactcgggaggctgaggcaggagacgcttttgaacccgggaggcggaggttgcagtgagccgagatcgcgccactgcactccagcctgggcgacagagtgagatccatctcaaaaaataaaaaatgaacacactgggagaataaatacacacaattgcagagctttggggaagtggctgagtgggtcactgggacctacccttcatcttccccaggtgagaagaatcatttactgtttcaagacctgaggcaggattttaagtaatctttgccacatgccatagtatcttgtcccagagaagagtcacaggcacccattttaccagtgagggaaccaatctccaacgtcagatgactctccgtacacccctttcatcatggtggcccagaaacgacttctgaaatggaaaccctcccaccctcactctgcctgttgctaagtggggtttctctgtattgcttgctgccatagtgaaagctgttccgagcttttcttttcctatggtcaggctttatccttcaccctgccctgcccttcccctgttcctgagatcaccccactatcagcgatggcatcctgccaattaaatggattaaattgttttgcagtttgttcacttaatttttatatctaggacagctacctggaatatctgcagatatttaggcctgataaacacatcttcattgagcttatgtaactgagtaactgactaatgcattccagtataatgtgtttttccttgaccttctagagagcagcaagtgatttgaggtttgcattgctggagagatcctggggccacgggaccaacatcaatgcatggcttagtttacagttttacttgggtagaggaaaggtgaggaccaagcaggagatttcaggactgttttcatgtagctacagaagatatgaagatacaaattcaagattatgcccttttttctgtacaaaaagaaaattcagagtcactttattttgttgtaaaagatctagaatctttggtcaaatcagtaaatacagattgagtcccctaatctgaaatctgaaatgctcctaaatctgaaactttttgagctctgatgtgaagcttgtaggagacgctcattggggcatttcagattttggattttcggattaagtatgctgaatctgtaagtatgtataatgcaaacattgcaaaattcaaaagtatctgaaatctgaaacacttctggtcccaggcatttcctaagtatactcaacatgcataaaggctaagtgggtaaagttctattcttagcattttttcatgtgcatcctaacttggcccttgtagcatcagattgttccttattttctcttttccaatatttaatttgtgagtcaagcctctgccctcattcctgctgtgtctcctttttgctttttctctctcttgtctatagccatcaacttgaggcatgtggtcctccaaggctatagcctgaatcctagcatccctatacctccttccatatctgttttccagggccagctagactctttctctgctggatctcactctgtggtcttaccagactgcaccactggtcagtcacccaattgtgccctgaatttcccttcctttgtatttaacttttaggcagtgtgcatggggtgcctgctcacacgttatgtgcaatgccaggccatggagatgcaacagtgaacaagagcaagcacataaccctgcccttgaggaagtgataggtgagctgtcagacctctcggcatctggaatgaccacggtcctcccacccctcacctccaccaccatttctacgtgtctaagtctgtccattcctcaaggcccagtttgctattttctcctccctgaagctcctcctcagaaattttggccagaggtgacttctgctgctgctaaactcccgcttgttttgccttttttctggcattctagtcacttgagtgttttcttctgtctttttttttttttttttttttgagtatgggcttcctaaaagcaggggctgggacttacccatctttgcctcttccacagcatctagcataatgacatgaatgcagtaagtgtgcaataaatgtgtgctgaataaattcaggaattcatgaaggttcacttccattttcctccaatgtgttttggcagagtgtcacttgctcattattaatcctgaaactttaatgaagtttgttttcttgggccatatgtgggggctcatgcctgtaatcccagcactttgggaagccaaggtgggaggatcgctttgagctcaggagtttaaaaccagcatgggcaacatagcgaaaccccatctctacaaagaaacaaaaattagccaggctttggcggcgtgcacctgtagtcccagctacttgggaggctgaggcttgagtccaggaggtggaggttgcagtgaaccgagaccacaccactgcactccagtctgggtaacagagtgagactctatttcaacaacaacaacaaaaaatttgtcttctttttctgtgagtatatgccaggcacacagtaaataattttgagtcctgggtgtaataggactcaaattgtagtggaaagtgaataggtgaacttttttatgcttacaggcatatttttcttaaaatatgcagttattatccaaatgaaaaggtgtcttagaaaattaactgtttacagttctcattgcccatattttacttctgaaaacaaagaaactgaaagtaaataataatgtacctctgggaactcacatgaagaggaaagaagacaggtttacacccgggttcaaatcccagctctgccatcttccgatttgtgcagcctaggctaagttgtttaacttatttgcacttccatctttatctctggctgtcagcatcttgatagactgtttcttgctcatctttgaatctcccattcctaaaatgatactttggaaatagacattcactcaatattggatgaatggatggaaggaaggaaattaccttatccattctattttgggagttttctgggatgactgtaaaagcagagcatgttcaacccattttattttccttttcaagttcacaaactgatattttagttatggggtgctttcattgatttttatggtagccatactctttgttaggtcatatttatatgccaaggatgccttgtctcaaatcttgcagattcatctgcagctataataatccagttcattataagatactatatttggggggttatttgggattttggggtttttttttttttttttttggacacagagtctcactctgttgcccaggctggagtgcagtggcatgatcttggctcactgcatcctccacctcctgggttcaagtgattctcgtgccttagcctcctgggtagctgggactacagttgcacaccaccatgcccagctaatttttgtatttttagtaaaggtggggttttgtcatgttggccaggctggtttcaaactcctggcctcaagtgatccacctgccttggcctcccaaagtgctaggattataggcgtgagccactgaacctggcctatattttgttttaatgcatatcaaaaaaatattaaagaggtcggttttattttatattttttaagtgtgaaaccttatagaagttaaaattttaagttctagtaaattattaaggtcatggttctatcacccctaaactcaaaaactctcctaacaaataaaatgcagttgctaagttgttgatatttataaggcttaaagtattttgaccaaatgatctttctgtcatttttattattaatctaataataataatgctttttgagaacattatttttttttttctggctctgcctttttagattctggtcaattttgagaactcctggtctcagtggcattcatgtgttttcagacaatgagagggaatctggaaagatttactagtcactcaaatgtgaataaatttagtaggaatttggacaaggaccaaatagtagtaggacttcctttccattaaacattatgtaaagtctttacagagaactcactcactctcaactctgtgggaataatttttaaaagtttacttgttgcttttgcagactaaaacttcatcattttagcaagtaatttggttcacttatttacttagtctttagcattagagagacctgtatttttaaattgcagattttttccttcctcgtcaggaggagtggttatgttctgtaatgctatgcttaagtaaaattacacatttggggtatctaaattggcatgccaaattataggacattttaattgttatgtggatgtgacagattcaattattcttgaactcttttgagaaagctgcccttagcagtgattcacagtagtaaacaaaagattaacaggaaaatgccctttatgaggcttaataaatgtgtccgattaaataccatgggacggaattaactgcaatgtctacatgtagaaaaacaacctgtgtcctgcttggaggttcagcatattctcttaagataaatttactctaaatatggcctaactgaagaactaagtgccacttaacctcagaactgttttcctaggtacgtcatttgggccaattgttcagactctttcttccctctgaaaccattaaccaaagccactaataagtagaaatgcagagttaagagccccttcctccctctttcaatttccagtggacatattaatgagcaataaagcagctaaaaggcaagcagctcaagaaagagaaagaagcaaagaaaggtgattgggaaaacagatattcagccctcagcaatgcagactgggctgccccgtgtgccatgtgggctgtgatcacaggaatttggagctcaatttcttaattggttctttagtcttatccaaagagaaaattggatttctagagatttcttctgtgcagagagcaattatgctaaagctgcttaggtaacagctttttcggctagcctttctctctcggaataataaagtacacccagagccgatttcagaatgcaccttaacctcaccatccagagtttagcccctcttggcagctgacatgttctagaaccttaaagaaattccagaagcatttacttcttttccattgcttagagtctatgaaactggctcggcaattaatttactgtcaggtctctcccatctgatttttatgacattaccctaccttttagataaatttaatttgactttcttaaatcaagaagtttcccaactctgatcatatgtataaatacccctcaaggctgagagtctgagagttaaaagcactaagtaatgataagaacccaaaatgcctttggcagaatataaaatgccacaggactgctgagtgcccagaataatagtctagaactttcattttcttcctttcctataacattatagtaataaaaggtcaggttaggcctttgtttgcttcgtaaaacagggtaatcaaaccatttaaatactatccaggcctaccacccaaacagattctctccctctcctgcccctttccgaaatattgtctctgttataatatgttactgcaaaacattgtgtttcaatgggtttctttctgctgattaacaggttttagattcaggaagactgaaagaatatgatgagccgtatgttttgctgcaaaataaagagagcctattttacaagatggtgcaacaactgggcaaggcagaagccgctgccctcactgaaacagcaaaacaggtgagcgtgctccaaggagttgtaattaaagtttgtctcagcggctccctccgcacaatttggcaccatgggtatggtaacaagcactgtgtacccttttcaattataagcctgcagagacaaagcttcatgagtgggtcttaacggcacgtcccgggttgaagtaaggtctgcaaagagttggcagaagcgggtaggggttggggggtcgagtgtgtgcacacatgtgtgcatgccgtgtgcccaagaagcggagaggtgttagaccagactttttacacatttagactctgtgggttcagattctcatagaaaaaggcatagagcacatagtactcatattctgcaaacccattgcatttcattcttattgataggcaaatgctgttgaggtacatacaggagatttaagagtttgggcaaaaagtgtgggatattgtttattgttctagaatgatctacctagaaaatgttctacctagatctacctagattgcttttggtttctgttttattatttgtaaagaaaactgttacataatactctcactgttgacctgggttttcccctcattctttgttgtttagaattaggcccatatagcccatatgcttcctccaccttctataagaggcagttgtcaggctgggagtggtggttcatgcctgtaatcccagcactttgggaggccaagcaggcagatcacctgaggttgggagtctgagaccagcctgaccaacacggagaaaccccgtctctactaaaaatacaaaaattagctgggagtggtagcacatgcctgtaaccccagctactcaggaggctaggcagaagaatcacttgaaccgaggaggcggaggttgcggtgggccaagatcacgccactgcactccagcctgggcagtaagagcgaaactccgtctcaaaaaaaaaaaaaaaaagatgtaattgccatcaggacaaatcaagaatttataatatgttatagctatagcctgaataatccttgaagtatgtttataaggcattaaagacacgcaggctacgtgatctctttccaacaatggtgatgtggaagtatctcattctacagatgtgataactgcagtttgatttaagggacttagccagatgtcacatggtcacctgtaattcttccttaaaattctgtgaggtgagagttgtattgatggagggagggaaggaacatccaatgttcttggcttagggtggaaggagacttctagcagtacatggtgaggctcccatcaaaactgttcatccataggcagtataatatgggtataattttccttcattgttttctgtatttttcaggttttcatcactgtaggtagaataaaattgcttgtttgtgtgtaatattttaaatatctattacagacaacagaataagaaaataggggccaacatggtgaaaccccatttctactaaaaatataaaaatcagctgggtgtagtggcgattgcctgtaatcccagctactcgggagactgaggcaggaaaatcacttgaacctgggaggtggaggttgcagtgagccaagatcatgacactgcactccagcctgggcgacagagcgagacaccatctcaaaaaaaaaaaaaaaaaaaaaagaccaggcgtgatggctcacacctgtaaccccagcactttgtttgggaggccgaggcgggtggatcacaaggtcaagagataaagaccatcctggccaacatggtgaaatccatctctactaaaaatacaaaaattagctgggcgtggtggcacacatctgtagtcccagctactcagggagactgaggcaggagaatagcttgaacctgggaggcggaggttgcagtgagctgagatggcgccactgcactccagcctggcaacagagcgaaactgcgtctcaaaaagaaaaaagaaaaagaaaatatgttcccatatctaatggtatttctgtattaaagatttatccaaataaaacctaggttgccttcagctcctatttcatctcattctccacagaagtgaggaactatccttgccactgtctgtaggatatttctttgaatcctgcatttatcctcaaaacgattctataaatgcctttgtgtgcacagtattacgctgggcactagcaaatacattaaacatgcccctagtcattgacaatataagccaaagaatagagcagagcagagatttgattgatgtggtgagccctgatggcaatgatgatgatgatgatatgtgtcagatgtgcactgtgcacttctcattatgcctgtttaagaggctgaggcatagagagggaaggaaattgcccatgatctcatagctagcagaattataggcagagtccggattcaagcctggctttaggatcgacaaaaatctgtgttctgaattttcataagaatcacattgtgtatgaataaagagggaagctgtacttgaagcactgtatttcttttatacttgaaatttacagaatacttttatcttctagcgtgtctcccagccaaagcttccctcataaaacccgatcaatcatttgggattccctgtataatctagtcacaaaagagccaggaacctcaaaaaccctttttgttctttggtacctcaggcatttcacatcaaagagatgtgtccctatctatatatcaaaatacctatttaaaaaatatgttatatattatcaaggcatggagtaataagaaataggtcatagaattttagcatgttccaactaacataagataatatagttcacctttgttttacagatgaggaaactaaggccccaagaagtaagtgggccctgactaatttatagcagagacagaattaggaatctttttttaaatcaatgtttaatgcaagtataacatacatatagaaagggacattggtcatagaattgaaatctcaattactggtccagtaatcttccatctaattcaacaatattaatcgtaacttacgttcgtatagttctttataatttattttacattgtttacatagttcttacatgtatgattctacttaatcctcacagcagtctgtaagtcttactgtattgatgaggatgttgggtcatgtgtcttcatgtggacacagagctggtccgtggagaacagaaggtagattgctgggggaggccgatgtcttcccctaagtagcgttctgtgtcaagcctgaaaacgctgctccttgtctcatttggtatccaagatgcagctagtcgcccaaattcacacagtggcagaatttccttcctggattttagtcctgcctaaccactggctcaggtcacctcctctacagaaagacataaggaaatacacagcttgattctcatccaagttgaatattttcttgacatttctgcatacacttggtcctcttaggagaacaagctgtcagattgtcaaccttttaaatgtgcaagcatcaaatatcaatgcatcattcacaactgtaacaccatgaggattagtctaaatcaacaagcttttcgctctcacagattagaattcatttgttggaaggaaaactcaacatctgggaaaaggtacttccaagtcacgtattcttgaccacggagttgctttcctgaaaatgctggtgcaggcaaagctgagtctctcttttgactgacctttgcagatgactcagtattttaatattttaaagtaaatttaaattacataattacatttcaggtacataaagctgaagggtgcactggtttgctcaggctgccatagcaaagtagcacagactagctggcttaacccacagcagattatgttctcacacttccgtgctggagtctgagatcagggtgtcagcagagctgctttcctctgaggcctctctccttggcttgcagatggctatatgttcacggggtctgttcacggggtcttttctctgtgtatgtctgtgtcctgatcacctctttctctaaggacaccagtcatattggatcagggcccaccctaaaggcctcattttaacttaattacacctttaaagactttctccaaatacagtcacattctgatgtacttgggggttaggacttcaacataggaatttagggggatgcaaatcagcccataacacagggtaaattcaatcattgtcttccctgatgaagccgacctaatttgaggttcccagtgagtaacagaggtgccattttatgcactcatgaaattgccagatacaactcaaaagttatgaaatcctggccaggtgtggtggttcacacctgtaatcccagcactttaggaagttgaggcgggtatatcacttgaagtcaggagttcgagaccagcctggccaacatggtgaaaccctgtctctactaaaaataaaaaaattagccaggcatggtggcgcatgcttgtaatctcagctactcgggaggctgaggctggagaatcacttgaacccaggagatggaggttgcagtgagcctacgtcacacgactgcactctagcctgggcggcagagcaagactccgtctcaaaaaaatatggatggatggatggatggatggatggatggatggatggatagatagacaagaagtcctgacatcctggatcctaggagcctggggcctgtttgaataggtggaggagacacttagcagccaatggccttacagaagtcacccaaggcctgtgagcctcagaggcctcacctgtcatgccaggattgcagtactgctccggtttcttcactgttaacatgtattaaatgagatagtgtatgtttaagtgagtcaaagaatataaggtgttttacaaatataagcgaattctagctattggttataaaagctcagtacttttttaagactgtagactgaactcttagctcccaataatagcaaaagaagtatccaaagttttgtagctttatagactaaataattacaaattatttttaagaatcagcttaccaaatgatatatgctcatgttacaaaattcaaagcattgatagttttgcaaaaaactttaataagtaaaaagtaagtcactctgccacacctgcccttcatcacgcagttcctctgccaggtttcagccctggcaccttcttctccactttgttgatgtattctgtgcataaacaagcatctgtgcatatatagcttttctggtttttgagcacaaataatagctattctttacggtttttcacttaatattatattccatattatatcaatacatatagttacctcattttattttatatgtgtattttttattagcgttctctctctctctctctctctctttctctctctctctctctctctctctctctctctctctctctatatatatatatatatatatatatatatatatatatatatatatatgtattttttttaaagcagtttcactcctgttgcccaggctggacctctatggtgcaatctcagctcactgcagtctccatcaagtgattctcctgcctcagcctcctgagtagctgggattacaggcgcccaccaccatgcctggctaatttttttgtatttttagtagagatgggtttttaccatgttggccaggctggtcttgaacttctgacctcaggtaacccacccaccttggcctcccaaagtgctgggattacaggcgtgagccaccatgaccggccagttacctcattttttaatggctacctagtatttatacttttccactctgtacttttcacttttcccaattaacttccaattaagttagctatttttgtttttttcctggtgaatgacttatcagatttatttactagtttatattctgtttcccagttgatcagtttctgcttttatctttattacctttgttttttggtttttctcgttgcttcttcttgaatgcatttgtgtccattctttcttccttagtattttagcgctgtgaattttcgtattctgttggttttgatatgtagtgctttcactcatagtttattttttatttatacattctgcaattttggattttaattttctctggcccagaaattattgaagagggaagtttttaaaactttttggtggtagcggtttgttttttctgttcatttcttttctgttttacgcatcagtttcattttcattgcatgtcatccatatcctttctatccatttggaattttctttgtgtcctagtttttctagatgttctttgggcattgaaaagatggtgttatctgtttaaggtatagagtttaataaggtttaattagttctactttgttaattacattcttattaatccttatttatattggtctattttctgtgacttggatctagaggtgaattagtttcacactgtacatatttctctttgtagtacctgtcatttttgttttggtaactttgatgctatggttttcagtccacagatgttcataacttgggtttccactatgaattatatttcctgccattttaacacacctttctttgattcatgtaatggttttggtcctaaatccacactggttcaaaactagactgggtcgcgtgcttttactttgctttctttgtctgctatatatgggattgtctttgaatatccaaaggtgtgtctcctgtatatggcgtggttaggttttactctgaggtttaatcttagcctttgtttttaatagatgattttagtacatttacatttattgagattataagtatgttttgtcttagttctgtcatgttatgctttcagtttttagtattcctttttaccttttaatttgtagtagataatttttgtttctttgaatattgttttgcatgtgttccttttgtttcctctaaatgctgtttcttgactccccattataaacaataacaatataaatacacttctgtctccatcctaccaccaaattttagcttagtttttcttctatttgccttcaaaccccaaatatacttaagcctctgttatttggcttttctttaaatgatactttctccatcttttagttagctaaagtttatccttcagtgctttttaaacctcaggctacaacccactagtggtgctgtggaatcaatttggtccatcatgactagtgtgttttaagatgtaaaatagaatacaatggaatagaagaaaaataacatgtatctttcatagtaatggtaatattttttgaaatgcttttcagtatagatacagatataggtagtggatgcgtaccaagtccctgtgtacagtgaaatgtgccacccattattgtgggtggcagtttaaaaaaaaaaagttgcaaaacaatgctctataccatctcaaagggaaaggttccttggaatttagaatccctgacttattgcatgtctgaaatctttgttacccctctgatttaaatgtggtggctgtaccatggcacacatttacctatgtgacaaacctgcacgttctgcacatgttatcctggaatttaacataaaaataaaaattttaaaaagttgtggatataaaattattgggtcacaccttctttcacttagtatgttgcagcctttgctctaaggtcttctcgtgttgtctgttcatatggagacatctatgaccatgtttgacacaactcagccttttttctttctttctttctttttcttttttttttttgagacagggtcttgctctgttgtccaggctggagtgcagtggcacaatcatagctcactggagccttaacctcccaggctcaagcaatgctcccttctcagcctcccttaaagctggaactagaggcacatgccaccatacctggctaattttttttccccccatagagacaaggtctcactgtgttttccatgctggtcttgaactcctgggcttaaaccatcatcccaccttggcctcccaaagtgctgggattacagatgtgtgccactatgcccagccagatcttttttcttgtatgctgaaagggtcattagttttcctaggacattattgtgcagtctttcagactttgattcaagttttcttttttttctggaagtttacttgaattatatccttgaatttttttatttgattatattctcttctttacaaatatctatcatgtatatgttttatgtcctttgtctattttgtaaagctattttctccttaatcctttttagttctttattaacttttagttattttgtttgtttgctcaatcctatcctgtgtctcacactgttttttcagcattggctaatctttgtgctgccttcagtagaaatgccacttatttttttattttttattttcccttttttgagacagagtctccgtctattccacaaactggagtgcagtggcgtgctcttggctcactgcaccctccaactcccggttcaagcaattctcatgcttcagcctcccaagtagctgggattacaggtgtgcgccatcacaattggctaattcttgtagttttacaagatttcattatgttcattatatgatacaagttttcattatgttggccaggctggcctcgaactcctggccctcaagtgatcctcccacctcagcctcccaaagtgctgggattacaggtgtgagccattgcacctagcccatttctttgatattttcacttttcttttccacttcacttttgaccactgtcaactcatgtttcagcatcttctgttgctctgccatgttttcctgtatttttgtatctctgttatgcacagcctgatcattctgctgcattttctttgaatgaattatattcataaactctatgtgctcaacatttgtcatgtgtttatcttacttcatttcttatttgtataatctccaggccctgtactactcttaaaattataataataatttttattattcctactcctcacctatgactaaaacgaactcttcctagaccagatagttacaggatagttgtggctagggccttgtttctggctaaagggaattttctgtgcttaatgtagaagtactttatgacccagagaggctgcgtgtgtggtgggggggatgcagggagggatgtgagtgtgtatgtgtatgggtgtgtgggtgtgtgggtgtgtgtgtgggtgtcaggggatgtgggtgtgtatgggtgtgtggtgggggtatgtgtgtgggggtgggagggtgtgtgtggggtgtgggtgtgtgtgggggtgtgggtgtgtgtatgggtgtgtgggtgtgggtgtgtgtggggggtgggcgtatgtgggtgtgtgtgggggtgtgtgtgggggtgtgggggtgtgtgtgtgtgtgggtgtgtgtgtatgggtgtgtgtgggggtgtgtggggggtgtgggggtgtgtggtgtgggtgtgtgtgggtgtgtgtgtgtatgtgaaattgagagtgcatgttttgcctttcttcctccttagcttacagaattgggcaattgcaatctgtcttctgtcaggacctcaccaatgtacataggtcagtcaaagatgtttctaattgattctttattgacataccttagcgctcctccaattaactggagaattcctatgattgttgaggcttgctcttcatagacatcttctcagccttgccacagccccattggttccagttgcatatggcagcccttcatgatattttaccattcaggctctcctgatttcacaaagatttagcttattttttattaatgaatatctttgatgttcagagtggtttctgaaaggaaaaggagaggaaattcattactccattatattaaaagcagaagtcctttctaagtctccattactctttgacaatatgcatgccaattatgtacaccaaaattagactggctttaaaaatgatgaacttgaggccttgagagttactgtgattgaattagggccatacacatcagtaaaaatgaactgacagggtcttgagcctgaattcaacacatcagatggtatcttaggaatgcaatgtcaatcaaagcccagttgctctcctttgtccacgtgcgggagcttgtattgctctgttgattttagtaaaatctagctctgttacggtggctttactgatgagttagagtttaaatatgaacttagtttcatcctacattagaggaactataatggagcaaactcaagagaagaaggaaaagagggacaaggtttcccatactcactgacctgatactcttcttgccgcaaacgtgaacgcttatggcattgtctcccttaagcttcacagtccttctgacctgctgttattatccccttttgacacatgaaaatgctaaagtacaagaatctgagtaacttttttttttttttttttttgttttgagacagtctctcactctgtcacccaggctggagtgtagtgttgcagtctcggctcactgcaatctctgcctcctgggttcaagtgattctcctgcctcagcctcccgagtagctgggactacaagcgtgcaccaccatgcctggctaatttttgtatttttcgtagagatggggtttcaccatgttggccaggctggtctcaaactcctgacctcaagtgatccacctgccttggcctcccaaactgctgagattacaggtgtgagccaccacgcccagcctgagtaagttttcaaagccaccagttcaaaagtgttcatactccatcttctatgatctttcagttctacctttctgcctcccaggttaccatattcattcagttgaaattgtctcagccacagctttgggattctgtaaagataaaagatgcaccagagggattcctaaatgctttgtcttcatccttcgagctgggcgatacctccacgttctgtgtgcttaggggccacttctctgagcagcattcatcatgacacccaacactaatgcagcaggttttcaacctgtagtttgtagccattaatcagttcctgtgacgtaagctattgttatctcatgttacagatgaggcagctggtagagagagtggttaggtaatttttccagaatcagcagtgaatccaggagagagctgagactggacctgtctatcccagacatagcttacaacatgagggctttgctaaaagtagttcagtaatctcaactcccttcatcacctgcactgtaaaaaagatgtttcatctcacctgtgctgttacccatagtgtgttataaaacctggtagcagaagagaaaaagaaaggtcaaatcaaagaatatatacacaggaagtttgtttttgactaagtatttcagaccatgaagctaagaccatttgggtttaaagttgctaataacaacactttctttatatatatttaaaaaaatacatcaagagggttacacagaaggaagcagcctatttggggaaggctatcaagcagtagaaagtgatgtgaatgtctatttgttcttttggctgtttttagtttcactacagaatagcctttttggagtacataaatctataaccacacaaaatatggctagcttaaaaaagtgggagagggagatgatatgaaattatcccctgaaaagtcttacttttgaacacttgcattataatggaaatagcctcagatttcttctggtggcattccagcattattggacaatttattttctccttaagtgacattttagtacattgtgtgttatatgtaatgatatttctggagtaacaagtgtgcaagaagtgagagaaaaagaaagtacacttaatatgtaggcaggtgtctcagcactttcttttttgtacgtgaatcccattatctccagtgataactttgttgacagcacccaccaatatattcagagcaaggttttataaaatagatccagaatcgtatgactaagagacccaggtgacacgtgtcagcctcagatagttgctacattttctgttttaaagattcaaacaaaacttttcacattcttctttggggaaaaaaaattacatttgaagtcctttttcacccaaacacgttttgagataagagctcacaagtcttgacattatttcattttgttatgcgcatctgtcaaggaaccaagatacgatacagctactaaaaactgatgattgtggaacagagaaacttgacagcatttcatttcctttatgttctgattatacgtttatcagaaaacctgtatctcttctagttcagctagaaattggtagaattcaggaactcaaaggcttggcaaagaactgtcctattatttggtatcatcttacattttagagaagttgcttggttgagtcattgttaaagcttttgcttctcttttcattattgtgggccactatccacagaccacatttctataggccctataactgctttgccgcacaaattaaacgccgggatgtttcatacgtatatgccagcatttcaatgcttgtcaatcagagtttataaaatatagggattacaacttgatattaacatccaaatctattgtgctcattttacgtgtgaaaatgagaaaccctcatgcagacgctagatttcccagcctctttgtcaccctgtttttaatttatctccaggttttgagtcagtaaaatgattccgcttatcaatttaatacagagataaaacatatctatgaatcagagtgatcggaactaaaatggatctacaggttgtttggcattcagcccagccctgctgagggttttagtggggctaatttctctgtacagtagattcatccctgttcttaaattgtgcctcagtgagggatatgatttgcttcacatgaagaagtagacacagaagtgcattgtttcagggaggagactttaaaattttgaaacattctttttatgcttaccttttttttttctaggtatacttcaaaagaaattatccacatattggtcacactgaccacatggttacaaacacttccaatggacagccctcgaccttaactattttcgagacagcactgtgaatccaaccaaaatgtcaagtccgttccgaaggcattttccactagtttttggactatgtaaaccacattgtacttttttttactttggcaacaaatatttatacatacaagatgctagttcatttgaatatttctcccaacttatccaaggatctccagctctaacaaaatggtttatttttatttaaatgtcaatagttgttttttaaaatccaaatcagaggtgcaggccaccagttaaatgccgtctatcaggttttgtgccttaagagactacagagtcaaagctcatttttaaaggagtaggacaaagttgtcacaggtttttgttgttgtttttattgcccccaaaattacatgttaatttccatttatatcagggattctatttacttgaagactgtgaagttgccattttgtctcattgttttctttgacataactaggatccattatttcccctgaaggcttcttgttagaaaatagtacagttacaaccaataggaacaacaaaaagaaaaagtttgtgacattgtagtagggagtgtgtaccccttactccccatcaaaaaaaaaaatggatacatggttaaaggatagaagggcaatattttatcatatgttctaaaagagaaggaagagaaaatactactttctcaaaatggaagcccttaaaggtgctttgatactgaaggacacaaatgtgaccgtccatcctcctttagagttgcatgacttggacacggtaactgttgcagttttagactcagcattgtgacacttcccaagaaggccaaacctctaaccgacattcctgaaatacgtggcattattcttttttggatttctcatttatggaaggctaaccctctgttgactgtaagccttttggtttgggctgtattgaaatcctttctaaattgcatgaataggctctgctaacgtgatgagacaaactgaaaattattgcaagcattgactataattatgcagtacgttctcaggatgcatccaggggttcattttcatgagcctgtccaggttagtttactcctgaccactaatagcattgtcatttgggctttctgttgaatgaatcaacaaaccacaatacttcctgggaccttttgtactttatttgaactatgagtctttaatttttcctgatgatggtggctgtaatatgttgagttcagtttactaaaggttttactattatggtttgaagtggagtctcatgacctctcagaataaggtgtcacctccctgaaattgcatatatgtatatagacatgcacacgtgtgcatttgtttgtatacatatatttgtccttcgtatagcaagttttttgctcatcagcagagagcaaccgatgttttattgagtgaagccttaaaaagcacacaccacacacagctaactgccaaaatacattgaccgtagtagctgttcaactcctagtacttagaaatacacgtatggttaatgttcagtccaacaaaccacacacagtaaatgtttattaatagtcatggttcgtattttaggtgactgaaattgcaacagtgatcataatgaggtttgttaaaacgatagctatattcaaaatgtctatatgtttatttggacttttgaggttaaagacagtcatataaacgtcctgtttctgttttaatgttatcatagaattttttaatgaaactaaattcaattgaaataaatgatagttttcatctccattcagagatctgtatttctgtgcttcaagggattcctgactcatgttcttgctgatgaatgccagtgagttttcctgagatcgaaaaatacagtatcaaaggataccttctatcatcaaccggttctcttggcaaattaggtgtaccaagtattctaacgggtagatttcagtgggtttcagacagtttgaagcagttgctatttaagcaagtccatttgcaccattctaggaagaaagagtattagcttatgcctcaggcttgagcagtattaaatggttgaggtttttgcttttggttttggtttttaaggtgactttgtccaaaactaacaagaaacatctaccgctgttacgctgaaatcactattaaataatgattctcaaagtgtggtccctggaccagcagcataccgcatcacctgggaactcgttagaaatgcacctttttgtgcctcaccgcagatctactgaatcagaaactctggtggtgggggccaggaatgtgtgttttaacaagccatagggtgactttttttaaggggccatgctaatctctgtatcattacaattttagtatatgtgctactgaagcgagcgccctaagtgtgattctgatgcaggctaaagtctgagaaccagtaccataaacttaaagaactcttaaaactcattaagaaaaacacagaaagcccaattagagaaatggacaagagatttgaatgggtatttcacaaaagagaatatccaaatggccaataactggaaaagtgctcactctttattagttaccagggaaatgcaaattaaaagcaccatgagataccactagacaccactagaatgtgtaaaatgtaacagactgagaataccaacccagtgccaatgaagcaacaggaattctcaggtactgccatgtaagtacattgaaaaaccatcttcggaaaacaatttgacagcattgactcaaactgcacactctgcgatctgtctgtagcactccaaatgtgtacacatgtgcaccaagagatgttgtcaaggatgttcctagaaacataattcctaacagcccaaacgagataatccaaatactcatcagcagcagaaggaaaacaaattatgaggtattaaaatacttctacagcaatgaaagcaattgactacatgaagaactcatgagtttcacagacatgatatttattccaaagaaacctggcccaaaagattatttatgatcccatttatataaaattcaaaaatgttacagctgaacaaaggagtgcaacaccagaacagttcataactttggggagatggaaggtgttggtaattaggggaaatacacatgaatcttctacgatacttaaaatactttttgtggctgggcatggtggctcatgcctgtaatcccagcactttgggaggccgaggcgggcagatcatgaggtcaggagatcgagaccatcctggctaacacggcgaaaccccgtctctactaaaaatacaaaatattagccgggcatggtggcgggcgcctgtagtcccagctactcgggagcctgaggcaggagaatggcgtgaacctgggaggcggagcttgcagtgagccgagatcgagccactacactccaacctgggcgacacagcgagactccatctcaaaaaaaaaaaaaaaaaatttttgtttggctgggtggtgattagatcgttattaattgaacacttttatgtgtcatacttcacactgagttaactttttaaaaagttggtcttgtttttcctttagaatctcagattcagtgcttcagtcttcaaaaagggaataatttacacgtaggaaattacttctgctgagttcttaaaataagaagctctttgacggttgtcttttgtggtccatcacagctgatgcgtctgatggttttggtacctgagaagccaaggtctatattttctctaaccaataaataaaataaatctcacttcctcttcaattttaggataagtacaaaaataaggaactctaaggtttttctggattctatttgtttaaccactctactgaggtatgactggcatatagaaagttatacatatttaatgtgtatgctttgtgtttggagacaaatatcacctatgaaaccatcaccacattctatgtcataaacatgtccatcacctcaaagtttccacctgctcattttctattttttaatctccattagaggagatgaggtacataaataaaataatttcagggacttggtctcggcaaagatgtatggctaagacttcaaggacaggcaatttaaatagacaaatgggactatattaaactaaaaagcttctgcacagcaaaggaagcagtcaacagagtgaagagacaacctgttgaatgggagaaaatattctcaaagtattcatccaacaagggactaatacctagaatatacgaggaactgcaacaactgaatagtaaaagacccacataattccattaaaaagtggggaaatgacatgaacaggcatttcttaaaagaggacatacaaatgtccaacaaatatatgagaaatgctcaacatcactaaccatccaggaaactcaaatcaaaaccacagtgagatatcaccacaatgagatatcaccttcccctggttagaatggctattattaaaatgagaataaataacggatcctagtgaaaatgcagaaaagagggaacttttacatactgttagtgggaatgtaaattaatagaatcctatggaaaatagtatggagatttctttttttttttttttttttttttttgagatggagtctcactctgtttcccaggctggagtgcagtggcatgatctcggcccactgcgacctccgcctcctggattcaagcgattctcctgcctcagcctcccaagtagctgggattataggcacccaccaccatgcccagctaatttttgtatttttagtagagatgaggtttcaccatgttgaccaggctggtctcaaactcctgacctcaggtgattcacctgccttggcctcccaaagtgatgggattacaggcgtgagccaccatgaccagcctggtatagagatttctaaaaaaacaaacctaaaaatagaagtccttacggctgggcgcggtggctcacgcctgtaatctgagctctttgggaggctgaggcagacaaatcacctgaggtcaggagtccgagaccagcctggccagtatggtgaaaccccatccctattaaaaatataaaaattagccagacatcgtggcacatgcctgtaatctgtaatcctagctactcggcaggctgaggcaggagaattgcttgaacctgagagacagaggctgcagtgagccgaggtcatgccactgcactccagcctggataacagaataagactctgtcttaaaaaaaaaaaaaaagatgtaccatacaaaccagcaatctcactaactgtgtatttacccaaaggaaaagaaacatatatttctttcatcagtatatcaaagggatacctgcactcttacgtttatcatagcactattcacaatagcaaaaatatggcatcaacctaagtgtccatcaatggatgaaataattttttatatgatgtacatatatgtaccatgcaatactattcagccataaaaaaaagaatggaaccatgtcatttgcagcaatgtggatggaactagaggtcattctgttaagtgaaataaggcaggaacaaaaagacaaataccacatattctctcatattggagctaaaacatttaatctcttggaaatagagaatagaatcatagataccagaggctgggaagggtgggtgggtgagagagggaggctggttaatgggtatgaacacaagtagaagaaagaagttctaatgtttaatagcagcctagggtgactatagttagcaacaatacattatatatttcaaagtaactagaagagaggacttgaaatgttaccagcacatagaaatgataaatactgaaggtgatagataccctcaaatgccctggcttgataattacacattctatgcatgtaacaaatacatgtatcccataaatatgtaattttaaaaatatatactatgtatcaatagaagaaataatgctaagtgcttttattaataacactataagtggttgatgtcttgtgaagaaacaactttaatcaattcaatgagtcagtgaattagatttattatgtagtattgttcaatttagtgagttgagttaatattaatttatcagctgattaacttgtccttatgtactgcaatgaaaattcgtgtttttctttcagagggtttgactgtggagattttagaagcctgtcttctcaaatctcggtatttgtttcaaatcctgttctcaaaagattaatgtatgccctgaagtatgttagattttgcacctgaatgaatgtgtaagtcacttcccacaaccaattctgttttagagcgttttcaagatctgcctttacctagaagactgtatgacattctggccatcacagctcaaaataatgtctttataattccacaaatgtgatatgcattactaatggacttattttactaaaagcaaagagagaaatctatcacctgaaataaagaaaactaagaatgttcaacaagtaatgctcatcctaaaagccatgtctatgctcaacccaacttattcaccaaatggtctaattctcaaatcctcattctttgaaaattgagtaaatgtgtgtcaatgaaatacttccaccctacttgataaatagtatagttatggactacattattccccaaatatagattgaaaaacaaatagttttcctcaaaaattgtaataaactcatggtttaatttccacaaaatatgttatatgtgttttaatggatatgttgatccttatcaaatggaagttttcaacccagagggtaattcattcacatacagagtccttgtttccactattttatatcggatttcaggatttagaaataagtgttatgattctgcagaagctagatgggggttgggaagaaataagtcttacgaatataactaacagttttcaagtaaaaatcctccccaagccctagaagcttctttggtctgtgctgcagtttgattatctgggatgcagactctgagatggagtttggtgttccggatgtttattacagagttacccttggaattaatccttgtggaatgaagagggaagaagcaggattgggtggatggagaaattgagctggagtgctagccagagagaccagctgatcccaccaggaaccctggagctaaaatggtccatgagggtcgtcctgtgtgccaatggccagggctttctccctccaccttgattagtcattgcatgagggctgtccccaaaaggggtgacagcagaaggttgcccagcaactacacctccagaagctgggacaagtccttgaagggggtgatgggtggcacatctccatgtccaccacagtgtatgttccagctctggagggagattattgaggtgttcagtggcagaagactcctggtgattggcatttaagtcaaaatgaattgccagttgacaggagatggctgatgaagtgattgtcttcaacaacctatgacctgaaaaagagaagagaaggtccatgcaggggaaatatcctcgttgtctttattctctaaaatcagccgtgttcatttattccaggaagtgatcttacgagcagtcttcggattggctaactcctatgtatgtcgataataccctgagcacccctcattacaatgaatcatagctggggtctgcagtgtgcaggactcctgcttagaaggacccagcacttagtttaatgccctgttttcgccatctagatattctgaagttttaaacaaagggccctgcttttgtattttgcactgggatctataaattatatatgctgccctgagtatttgtggttctgtttcctctctaaaccatgagcttctgaggacttggaccatgccctgttgattttaaaatctgcatcttctagcacaatgtctgtcacatcgtgggtgctcataaatgtttgctgagtgaatggataatgactgggaagaagccttcctttaaactgtaattctgagatttaagggagtatcctggggtagtagaaagatccctagtttgggggtcaatcccatatatctggcagccaattctgtcttagctactccctagcaatgttgggtgatcaaagtatatgctgtccgatgtcggagacttttgagagtgaaaagaaagcactaaccagccatggtgccagggcaataaattgggactgtccttgacaaatggggatatggccaccctatagccatgtatccttggttacatgcttggataagtttctgtctctatgaacctcaactgcttcatctgtaaaatggacatagttcctgaacttgcacagttgctttggttgggatgattggtggaccaagagcatccaacagaacagaaaggttaggacctagagggaaatgcattgagtttgtatagtaagaaggtcccttcttccatcatgagaggagagtaagataaatgtggatgaaggtaggtttgtaaactgtagaaggtgtatttcaggaggtcctcaccatggcctaaaccgaactgttcttactttacatagagttaaaatgaaacaagcacacacgagaaggagcccaagctctggagtccaccttcctgggtccgaatgctggctcctctgtgcagtgggagtggctgcctgggtttgagtccaagttctactacctgttaattgttggcccttgtgttgggaagcacactatgcttccatttctttttctgtaaaattgaggttggggtggtacttttctcagagggctgttgggaggatgaaatatgaaggacgtactctacaacagtgacgctcaaagcatggtctgtgggctagtgccaggccatgaactgttcgtaacctcaggccacaataagtacaggaatttcaggaaagccattagaaacctttataggcttttgactttgccatgacatccaaactcatgattgggggactccttgtggagcagccaagagtttgttgaacctggataatgaggcatgtgtggtgtgagtagcacattagccatgcacagtagaactacttattagtttgcaatggattgaaaatttaaaataattaaataaaacctattcttaaccccagataattgagaagcaccattttagaacaatgcctggtgtgcaattagctctcagtaaacacaagcctctttattaatcagggaaaaattataccatgacttacatgtttaaaattaggctacacagactttccaaatgctctactatacattagcaatattctaaaatagcattaaaagccaaaatcctgctcattgttaattagggatgtgtaaagtctaaaagtattttaaaaacgatgctatgcatatgtttacaccaagtctattcttgaattaacagcatgatcttgatgttgaaggtggtagctgggtacacatcaggccacttgtaaaagtggggaacatggggccgggtgcggtggctcatgcctgtaatcccagcactttgggagaccgaggcagacagatcacctgaggtcgggaattcgagaccagcctgaccaacatggagaaaccccgtctctactaaaaatacaaaattagccaggcatggggtcctgcgcctgtaatcccagctacttgggaggctgaggcaggagaattgcttgaaccagggaggcggagattgcagtgagccaagatcgcaccattgcactccagccagggcaacaagagcgaaactctgtctcaaaaaagaaaaggggggggggaacacgggttgatatgcagggtattgactttcctttaaaaacagaaagaatgtgggttaactgaggttttgctttttaaatgtaatgttctaaagaaaataacctcatcttttcaaaaataaagcagcagtgtagattgaaggctgagagaaacatatttatttgaacttagaactaaaaaataataaaaggataacataccctggccctaaaagaccttcacttacactccaggtttatctcacttatcacagggggggggtccacatagggattatatggtttttcaagaaggaccaagataaaaacttagataaaatacagatactttacagaaagcttacactggaaagttctggctaaattcagtattttgctcagcaagcatgctcataaaacaaccaatgcaccattatccgtagcaatagatggaaagccttgggtattgcaaaacggcgtttgatccaaaagttactcatatttgattttggagggcattacgagaaaccttttgaaaataaaattttgcagactacttagagaaaaattaaaatgagtcaaggctgggtgcaggggttcatgcttgtaatcccaacactttgggaggccgaggtgggcggatcacctgaggtcaggagtttgagaccagcctgggcaatatggtgaaaccccgtctctactaaaaatacaaaacttagccaggtgtggtagcacacacctgtaatcccagctactactcctactccagaggctgaggtgagagaatcgcttgaacccgggaggcagaagttgcagtgagccaagactgtgctactgcgctccagtctgggcaacaaagcaagactgtctgaaaaattaaattagtaaaataaaatgagtctctatgaaacagagtttatatcacattattttcagtaaaaagaagaatcaacaaaggattgaggtggttttttttttctttttggtttttggttttgttttttttttttttcaagataaggtctcactctctctccccgtctggaatgcagtggcacaatcatggcttactgtagcctcaacctcctgggctcaggtgatcctcccacctctgcctcctgagtagctgggactacaggcacatgctaccatgcctggctaattttatttttaaattttttgtggagacagggtctcactatgttgcctaggctggctggtctcaaactcctgggatcaagcaatcctcccctctcagcctcccaaagtgctaagattagaagcatgaaccacggctcctggcccagactgaagatttttaaattacatcttataacataattaattaaaaataacccatgagttcatactgattctaataagacagatgaagatagataggaagataagataagatgatagatatttaggtagataggtagatatgtagctaagtagatggatggatagacggacatatggaagggaaaggtcttttagaatttcaactaataaatatagaaggattgacacaaagagcagcatgcggaagccatcattgtcataaataattcagacaaaattcaacattggctcctaaatgaatatagggtgagtgtttgggtgggaacaatgtatttgcatggacagaaagtatcttcttgtattaattaaaaaagagaggaattgtatctttatagtagaagaatctggcagacatcaccctaaccaggtgaccagagttaacatcaataataggaccagtagacacccttgtctcttgatgtataaggcaatgacaatgacaccatttctgtgtttttctttctggcctcaccccccaaaaaagccaaacctggatcaaatcaacagaaaagcccaaattaagggcactctataaaacaacttgcctgtatgctttgaaaatgacaatgaccattaaaggtttagaaagtgtttcagattaaatggaaacttaaaagacatgataattaaatgcattgtgtgatcctggatccaaaagcatgcaataaggacagaaccgagacaattagtgaaatttgaataactgtgtagttgatcata

SEQ ID NO: 1236 - DNA, 5425 bp, Homo sapiens
tttttcttcttttaggaaagtgccaaagtaatccagcccatatttttgggaaaaattattaattattttgaaaattatgatcccatggattctgtggctttgaacacagcgtacgcctatgccacggtgctgactttttgcacgctcattttggctatactgcatcacttatatttttatcacgttcagtgtgctgggatgaggttacgagtagccatgtgccatatgatttatcggaaggcacttcgtcttagtaacatggccatggggaagacaaccacaggccagatagtcaatctgctgtccaatgatgtgaacaagtttgatcaggtgacagtgttcttacacttcctgtgggcaggaccactgcaggcgattgcagtgactgccctactctggatggagataggaatatcgtgccttgctgggatggcagttctaatcattctcctgcccttgcaaagctgttttgggaagttgttctcatcactgaggagtaaaactgcaactttcacggatgccaggatcaggaccatgaatgaagttataactggtataaggataataaaaatgtacgcctgggaaaagtcattttcaaatcttattaccaatttgagaaagaaggagatttccaagattctgagaagttcctgcctcagagggatgaatttggcttcatttttcagtgcaagcaaaatcatcgtgtttgtgaccttcaccacctacgtgctcctcggcagtgtgatcacagccagccgcgtgttcgtggcagtgacgctgtatggggctgtgcggctgacggttaccctcttcttcccctcagccattgagagggtgtcagaggcaatcgtcagcatccgaagaatccagacctttttgctacttgatgagatatcacagcgcaaccgtcagctgccgtcagatggtaaaaagatggtgcatgtgcaggattttactgctttttgggataaggcatcagagaccccaactctacaaggcctttcctttactgtcagacctggcgaattgttagctgtggtcggccccgtgggagcagggaagtcatcactgttaagtgccgtgctcggggaattggccccaagtcacgggctggtcagcgtgcatggaagaattgcctatgtgtctcagcagccctgggtgttctcgggaactctgaggagtaatattttatttgggaagaaatacgaaaaggaacgatatgaaaaagtcataaaggcttgtgctctgaaaaaggatttacagctgttggaggatggtgatctgactgtgataggagatcggggaaccacgctgagtggagggcagaaagcacgggtaaaccttgcaagagcagtgtatcaagatgctgacatctatctcctggacgatcctctcagtgcagtagatgcggaagttagcagacacttgttcgaactgtgtatttgtcaaattttgcatgagaagatcacaattttagtgactcatcagttgcagtacctcaaagctgcaagtcagattctgatattgaaagatggtaaaatggtgcagaaggggacttacactgagttcctaaaatctggtatagattttggctcccttttaaagaaggataatgaggaaagtgaacaacctccagttccaggaactcccacactaaggaatcgtaccttctcagagtcttcggtttggtctcaacaatcttctagaccctccttgaaagatggtgctctggagagccaagatacagagaatgtcccagttacactatcagaggagaaccgttctgaaggaaaagttggttttcaggcctataagaattacttcagagctggtgctcactggattgtcttcattttccttattctcctaaacactgcagctcaggttgcctatgtgcttcaagattggtggctttcatactgggcaaacaaacaaagtatgctaaatgtcactgtaaatggaggaggaaatgtaaccgagaagctagatcttaactggtacttaggaatttattcaggtttaactgtagctaccgttctttttggcatagcaagatctctattggtattctacgtccttgttaactcttcacaaactttgcacaacaaaatgtttgagtcaattctgaaagctccggtattattctttgatagaaatccaataggaagaattttaaatcgtttctccaaagacattggacacttggatgatttgctgccgctgacgtttttagatttcatccagacattgctacaagtggttggtgtggtctctgtggctgtggccgtgattccttggatcgcaatacccttggttccccttggaatcattttcatttttcttcggcgatattttttggaaacgtcaagagatgtgaagcgcctggaatctacaactcggagtccagtgttttcccacttgtcatcttctctccaggggctctggaccatccgggcatacaaagcagaagagaggtgtcaggaactgtttgatgcacaccaggatttacattcagaggcttggttcttgtttttgacaacgtcccgctggttcgccgtccgtctggatgccatctgtgccatgtttgtcatcatcgttgcctttgggtccctgattctggcaaaaactctggatgccgggcaggttggtttggcactgtcctatgccctcacgctcatggggatgtttcagtggtgtgttcgacaaagtgctgaagttgagaatatgatgatctcagtagaaagggtcattgaatacacagaccttgaaaaagaagcaccttgggaatatcagaaacgcccaccaccagcctggccccatgaaggagtgataatctttgacaatgtgaacttcatgtacagtccaggtgggcctctggtactgaagcatctgacagcactcattaaatcacaagaaaaggttggcattgtgggaagaaccggagctggaaaaagttccctcatctcagccctttttagattgtcagaacccgaaggtaaaatttggattgataagatcttgacaactgaaattggacttcacgatttaaggaagaagatgtcaatcatacctcaggaacctgttttgttcactggaacaatgaggaaaaacctggatccctttaatgagcacacggatgaggaactgtggaatgccttacaagaggtacaacttaaagaaaccattgaagatcttcctggtaaaatggatactgaattagcagaatcaggatccaattttagtgttggacaaagacaactggtgtgccttgccagggcaattctcaggaaaaatcagatattgattattgatgaagcgacggcaaatgtggatccaagaactgatgagttaatacaaaaaaaaatccgggagaaatttgcccactgcaccgtgctaaccattgcacacagattgaacaccattattgacagcgacaagataatggttttagattcaggaagactgaaagaatatgatgagccgtatgttttgctgcaaaataaagagagcctattttacaagatggtgcaacaactgggcaaggcagaagccgctgccctcactgaaacagcaaaacaggtatacttcaaaagaaattatccacatattggtcacactgaccacatggttacaaacacttccaatggacagccctcgaccttaactattttcgagacagcactgtgaatccaaccaaaatgtcaagtccgttccgaaggcattttccactagtttttggactatgtaaaccacattgtacttttttttactttggcaacaaatatttatacatacaagatgctagttcatttgaatatttctcccaacttatccaaggatctccagctctaacaaaatggtttatttttatttaaatgtcaatagttgttttttaaaatccaaatcagaggtgcaggccaccagttaaatgccgtctatcaggttttgtgccttaagagactacagagtcaaagctcatttttaaaggagtaggacaaagttgtcacaggtttttgttgttgtttttattgcccccaaaattacatgttaatttccatttatatcagggattctatttacttgaagactgtgaagttgccattttgtctcattgttttctttgacataactaggatccattatttcccctgaaggcttcttgttagaaaatagtacagttacaaccaataggaacaacaaaaagaaaaagtttgtgacattgtagtagggagtgtgtaccccttactccccatcaaaaaaaaaaatggatacatggttaaaggatagaagggcaatattttatcatatgttctaaaagagaaggaagagaaaatactactttctcaaaatggaagcccttaaaggtgctttgatactgaaggacacaaatgtgaccgtccatcctcctttagagttgcatgacttggacacggtaactgttgcagttttagactcagcattgtgacacttcccaagaaggccaaacctctaaccgacattcctgaaatacgtggcattattcttttttggatttctcatttatggaaggctaaccctctgttgactgtaagccttttggtttgggctgtattgaaatcctttctaaattgcatgaataggctctgctaacgtgatgagacaaactgaaaattattgcaagcattgactataattatgcagtacgttctcaggatgcatccaggggttcattttcatgagcctgtccaggttagtttactcctgaccactaatagcattgtcatttgggctttctgttgaatgaatcaacaaaccacaatacttcctgggaccttttgtactttatttgaactatgagtctttaatttttcctgatgatggtggctgtaatatgttgagttcagtttactaaaggttttactattatggtttgaagtggagtctcatgacctctcagaataaggtgtcacctccctgaaattgcatatatgtatatagacatgcacacgtgtgcatttgtttgtatacatatatttgtccttcgtatagcaagttttttgctcatcagcagagagcaaccgatgttttattgagtgaagccttaaaaagcacacaccacacacagctaactgccaaaatacattgaccgtagtagctgttcaactcctagtacttagaaatacacgtatggttaatgttcagtccaacaaaccacacacagtaaatgtttattaatagtcatggttcgtattttaggtgactgaaattgcaacagtgatcataatgaggtttgttaaaacgatagctatattcaaaatgtctatatgtttatttggacttttgaggttaaagacagtcatataaacgtcctgtttctgttttaatgttatcatagaattttttaatgaaactaaattcaattgaaataaatgatagttttcatctc

SEQ ID NO: 1237 - protein, 1196 aa, Homo sapiens
MDSVNTAYAYATVLTFCTLILAILHHLYFYHVQCAGMRLRVAMCHMIYRKALRLSNMAMGKTTTGQIVNLLSNDVNKFDQVTVFLHFLWAGPLQAIAVTALLWMEIGISCLAGMAVLIILLPLQSCFGKLFSSLRSKTATFTDARIRTMNEVITGIRIIKMYAWEKSFSNLITNLRKKEISKILRSSCLRGMNLASFFSASKIIVFVTFTTYVLLGSVITASRVFVAVTLYGAVRLTVTLFFPSAIERVSEAIVSIRRIQTFLLLDEISQRNRQLPSDGKKMVHVQDFTAFWDKASETPTLQGLSFTVRPGELLAVVGPVGAGKSSLLSAVLGELAPSHGLVSVHGRIAYVSQQPWVFSGTLRSNILFGKKYEKERYEKVIKACALKKDLQLLEDGDLTVIGDRGTTLSGGQKARVNLARAVYQDADIYLLDDPLSAVDAEVSRHLFELCICQILHEKITILVTHQLQYLKAASQILILKDGKMVQKGTYTEFLKSGIDFGSLLKKDNEESEQPPVPGTPTLRNRTFSESSVWSQQSSRPSLKDGALESQDTENVPVTLSEENRSEGKVGFQAYKNYFRAGAHWIVFIFLILLNTAAQVAYVLQDWWLSYWANKQSMLNVTVNGGGNVTEKLDLNWYLGIYSGLTVATVLFGIARSLLVFYVLVNSSQTLHNKMFESILKAPVLFFDRNPIGRILNRFSKDIGHLDDLLPLTFLDFIQTLLQVVGVVSVAVAVIPWIAIPLVPLGIIFIFLRRYFLETSRDVKRLESTTRSPVFSHLSSSLQGLWTIRAYKAEERCQELFDAHQDLHSEAWFLFLTTSRWFAVRLDAICAMFVIIVAFGSLILAKTLDAGQVGLALSYALTLMGMFQWCVRQSAEVENMMISVERVIEYTDLEKEAPWEYQKRPPPAWFGVIIFDNVNFMYSPGGPLVLKHLTALIKSQEKVGIVGRTGAGKSSLISALFRLSEPEGKIWIDKILTTEIGLHDLRKKMSIIPQEPVLFTGTMRKNLDPFNEHTDEELWNALQEVQLKETIEDLPGKMDTELAESGSNFSVGQRQLVCLARAILRKNQILIIDEATANVDPRTDELIQKKIREKFAHCTVLTIAHRLNTIIDSDKIMVLDSGRLKEYDEPYVLLQNKESLFYKMVQQLGKAEAAALTETAKQVYFKRNYPHIGHTDHMVTNTSNGQPSTLTIFETAL

SEQ ID NO: 1238 - DNA, 43700 bp, Mus musculus
  misc_feature (1)...(43700): n = A,T,C or G
gataccaggtaccaaagttgaatcaggatcaagttgaccttctaaacagtcccatatcccctaaagaaatagaagcagttataaatagtctcccagccaaaaaaagcccaggaccagacgggtttagtgcagagttctatcagaccttcaaagaagatctaattccaattctgcacaaactatttcacaaaatagaagtagaaggtactctacccaactcattttatgaagccactattactctgatacctaaaccacagaaagacccaacaaagatagagaacttcagannnnnnnnnnnnnnnnnnnnnnnnnnnnnnnnnnnnnnnnnnnnnnnnnnnnnnnnnnnnnnnnnnnnnnnnnnnnnnnnnnnnnnnnnnnnnnnnnnnnnnnnnnnnnnnnnnnnnnnnnnnnnnnnnnnnnnnnnnnnnnnnnnnnnnnnnnnnnnnnnnnnnnnnnnnnnnnnnnnnnnnnnnnnnnnnnnnnnnnnnnnnnnnnnnnnnnnnnnnnnnnnnnnnnnnnnnnnnnnnnnnnnnnnnnnnnnnnnnnnnnnnnnnnnnnnnnnnnnnnnnnnnnnnnnnnnnnnnnnnnnnnnnnnnnnnnnnnnnnnnnnnnnnnnnnnnnnnnnnnnnnnnnnnnnnnnnnnnnnnnnnnnnnnnnnnnnnnnnnnnnnnnnnnnnnnnnnnnnnnnnnnnnnnnnnnnnnnnnnnnnnnnnnnnnnnnnnnnnnnnnnnnnnnnnnnnnnnnnnnnnnnnnnnnnnnnnnnnnnnnnnnnnnnnnnnnnnnnnnnnnnnnnnnnnnngcccgtacctaaacatgataaaagcaatctacagcaaaccagtagccaacatcaaagtaaatggagagaagctggaagcaatcccactaaaatcagggactagacaaggctgcccactttctccctaccttttcaacatagtacttgaagtattagccagagcaattcgacaacaaaaggagatcaaggggatacaaattggaaaagaggaagtcaaaatatcactttttgcagatgatatgatagtatatataagtgaccctaaaaattctaccagagaactcctaaacctgataaacagcttcggtgaagtagctggatataaaataaactcaaacaagtcaatggcctttctctatacaaagaataaacaggctgagaaagaaattagggaaacaacacccttctcaatagtcacaaataatataaaatatcttggcgtgactctaactaaggaagtgaaagatgtgtatgataaaaacttcaaatctctgaagaaagaaattaaagaagatctcagaagatggaaagatctcccatgctcatggattggcaggatcaacattgtaaaaatggctatcttgccaaaagcaatctacagattcaatgcaatccccatcacaattccaactcaattcttcaacgaattggaaggagcaatttgcaaattcgtctggaataacaaaaaacttaggatagcaaaaagtcttctcaaggataaaagaacttctggcggaatcaccatgccagacctaaagctttactacagagcaattgtgataaaaactgcatggtactggtatagagacagacaagtagaccaatggaatagaattgaagacccagaaatgaacccacacaccttatggtcacttgatcttcgacaagggagctaaccatccagtggaagaaagacagcattttcaacaattggtgctggcacaactggttgttatcgtgtagaagaatgcgaatcgatccatacttatctccttgtactaaggtcaaatctaagtggatcaaggaacttcacataaaaccagagacactgaaacttatagaggagaaagtggggaaaagccttgaagatatgggcacaggggaaaaattcctgaacagaacagcaatggcttgtgctgtaagttcgagaattgacaaatgggacctaatgaaactccaaagtttctgcaaggcaaaagacaccgtcaataagacaaaaagaccaccaacagattgggaaaggatctttacctatcctaaatcagataggggactaatatccaacatatataaagaactcaagaaggtggacttcagaaaatcaaataaccccattaaaaaatggggctcagaactgaacaaagaattctcacctgaggaataccgaatggcagagaagcacctgaaaaaatgttcaacatctttaatcatcagggaaatgcaaatcaaaacaaccctgagattccacctcacaccagtcagaatggctaagatcaaaaattcaggtgacagcagatgctggcgtggatgtggagaaagaggaacactcctccattgttggtgggattgcaggcttgtacaaccactctggaaatcagtctggcggttcctcagaaaattggacatagtactaccggaggatccagcaatacctctcctgggcatatatccagaagatgccccaactggtaagaaggacacatgctccactatgttcatagcagccttatttataatagccagaagctggaaagaacccagatgcccctcaacagaggaatggatacagaaaatgtggtacatctacacaatggagtactactcagctattaaaaagaatgaatttatgaaattcctatgcaaatggatggacctggagggcatcatcctgagtgaggtaacacattcacaaaggaactcacacaatatgtactcactgataagtggatattagccccaaacctaggatacccaagatataagatacaatttgctaaacacatgaaactcaagaagaatgaagactgaagtgtggacactatgcccctccttagaattgggaacaaaacacccatggaaggagttacaaagacaaagtttggagctgagatgaaaggatggaccatgtagagactgccatatccagggatccaccccataatcagcatccaaacgctgacaccattgcatatactagcaagattttattgaaaggacccagatgtagctgtctcttgtgagactatgccggggcctagcaaacacagaagtggaagctcacagtcagctaatggatggatcacagggctcccaatggaggagctagagaaagtagccaaggagctaaagggatctgcaaccctataggtggaacaacattatgaactaaccagtaccccggagctcttgactctagctgcatatgtatcaaaagatggcctagtcggccatcactggaaagaaaggcccattggacacgcaaactttatatgccccagtacaggggaacgccagggccaaaaagggggagtgggtgggtaggggagtgggggtgggtgggaatgggggacttttggtatagcattggaagtgtaaatgaggtaaatacctaataaaaatgggaaaaaaattaaaaaaaaaacttcttattcttggtggacaagtgaaaaaatctaccaactttgaagctgctgctttactctattttctaggtcaaatgtcccttccccctccagatataaacagtgatgactacctttatgcttcatgacctatatactcacatcactactacatgtatggttctttgctacatgtgtaacacatgcaaaaggtgtttgcttccccatcaacctgcccatcatcttttctcgtgttcttccttttgctaatacatctctagctttagttgggttcacatttctcttcttcatttgaaactaaagtaaccataacaactattttttctgaccaatatgtttcaagaaaaaaaattaatctccagagaacacctgggtcgcaatatccctgcgagagtggtggcaaatagctgaagtccctcagaaagtgccttataggactatggggagggatgaaggcagaacacaggctcatcaggcctgtgtcagagcacagacagaagcagtctcttagctggccttttcctcaaactactctgggtgcttttcctgactagggcatcaccactgtagtggaagggatattcatgcctgcttctgattcctaccagggcattatgagcttcctttcctgaaagcctcttgctttctctaagaactcttcctcttgttagcagtttaatcaaaatttgaattgaacctgacgctaaaatactcacttgcttatagaaatgtctttaacaaggagtaaaccaccagaactcacagactctgtctggcatacccaaagatacagtcagaaatcttatggaggctttggaggcataatactacagtatttcatattacacctagaaagaagagaaagaaaaagaagcagaaagaagaagacacacaactgaagatgtatggtaaggagaaaagagaaatgtaagaagagtcacaaaaggaaaaggttgtactcctagaaatgaaacttcaaaatgctggggctccccctcagagcccttggactgagtcagcacaactcataaagtgctaagacaatgctgttcagttggagttgaagtacatgggttcctttaaccaccctcgcctacctgatccccatgagagttttcacctcacttaccacctgctctgctaagcagatgtaattatcttcccagaagaaagcaggtgcccaggcttctttcatatcttaactacagaatctactgactaaggcaggtagaggggtgcagttagtacagacctgatggaatgcatttgaatacattttaagtattcctgggacatgagatttggacccgggattagcattccctgcctcttattctgtttgttttttccacatcaacacccaagagcaaggtaagtgacttcccaattgtccttatttggggactcttactatatgtgtaaggaatagtttacagccttcaagtaaaaaacattcagacaagtactttttcactgacaaaagctggatggataaggaatgcgtggactcttatctgtctataatggatgggagagcaccctcatagaggcagggggtaggggaagggatagggagttagtggaggggagactgggaagggggataacatttgaaatgcaaataaataaaataagcaataaaaataagaaaaaatgaaattttgttatttggaggaagatggatgaagcttcacagtatctcacatttgtgggaaattaagtgtgagtaggggggttaagttttgtaaatagaggaaagacgatgagggcagaaggaagggaaggaataggaggaggaggaggaagaaaaagtacaattatgatttaaaatgaaaaacaatgtctcatgttttctctcatgaaatacatataactcctacagatacacatgaatggataacatgaggaagggggagtactgtggaaagtaaatagacatggtaataagacgcccaagaaattaattagggtaagtaccaccaacataaagtaatacatatgaaaatgtcatcatgacacccagtcatttatataatgactaaaaaaaatagtaactcatttttaaaagatactcaagtctgagagttttccagaagatgtgttaacattcctaactgggagactctgagtaatatatgccttcctgagtacactctgaatcagtaaacaaggagtactcacttgacgaattcccacagctcttcatccagttttagcatcctgggatctcactaaaagctcagttctcaaggaccacagtgaaaggtttatgtatgaggacagtttacaacacaaaaataagaaccttttctatatgtcttgtctgtttcatagacaccctaaatgattacaaaagcagagacaattccagacacttgcacaaggggtactggaaaatctatgaaatcctccaattctgctcccatacaagatatgtgatcctttctagggattcacatttgaagaacacatgagaaaaggactatagaagaagaataagaaatggaagagatgactgaagagaggagtttgacaatctgagcaaattgctaaggatcaaaaccaaggaataaacccaaggaccttcccttgggtcctggcttctcaggtgcccaaagactcttttttcatcttcctttcaaacaactctgacaaagcagtgccatccatgtctgtcatgtggaggtcagggaggacagataagaaaagggaagttctttgcctgctttcggcttcaaaggatcctacgttaagaaacagagttaccattgctcacccacaatctctagaagtattagtgatgtttctcatttttctttaagcttcccgcactctatttagatttctctctgatgtcctttcagcatctcctgccccacccaaaaggggtaagcacaccagtggaaatcccctgagcaaactagcacatgctgtaccaaaatattatgtcttaactttgttcttttacatcttcacaactaaaggaaagagatacaatcaaaatgatggtccacttaaatgataaacaagagaatttaaagagacatgatacaattgttcaccatggagtgatagcccatgaaaggctgatgaggttggggttagtagatataatacatatgaatttctccttaaacattttcacatagctttgagaatttatcattgtagatttctagaaagcacattcaacttagtgtgcaaaacaggctgattttgcggtatgtttttctgatgaagctttcaaagcaagattacaagccagagtgtaaataattacctgattccccaaatcatttcttttgttgcttgggagaaaatttgaaattctccaaaagaggcccaaaatgcatggcagagatagaatatgctacctccaactgaattctttctctaacatttctttatggattgtagtcaagaacttgatgttataacagatgaaaatcacataacacctctaagatcccctcaacctgaggaggcattttcagagaacagcacaaataatacatctcctttcttttcttattagatcatctcattaagacatgttgagggaagttaagtcaagttgtagtcaaactctaaaactctcaggtactaatgctattcaacctctgggtggcattgatcatctactctaacttagtcattttatagactcaagtaactgattcttccagaaatctagctataacagaagttcataaaatcctatccactcagatgttttgaactccttctattataatcattcttactgcttctttacaaacagtgtgattatgaatcaaaatttaaaaaaaaactgtactctatggtctggatccagatttcttgattccttcaaagaactgaaaaggggccactcatctatctagttatgacaggaccctgataatgaacttaaagaaaataatccaactttatcaaaatctcagccattcttaacaaaaagcaccaattcatcttgaggccatgttaaaaacaaagtggattggcatacaagtttagccacagtctgaataatgactgcctccaacacctatcctacatgccttggagccaataaagtttatgtgaagcctttgttaaagaaaaattgataaccagtatgatgaaactctcttttaaatattctgagattgtacttatgtagctgtttagagatcagaagttttctaaagtcagatggtgtaagttttactatttatatatcatctctttgcccactcatctctactatatgtatgagaacagctgcagatagtacacaacaaatgggtaacattggactccaacaacgaattacttatgaaagaaggtaaaggatcaaattccattcctgagtcataatttgccaacacttgcatttaataatttctccgtgcctgtacttaatagttaagtacaggtgtatactagagatatatagaactcaaaggagaaaaatggctacatttgtacactgaaagattgagtgtaaaaaatatttttaaatgatcttttaatagcttatgaaagatgaaatctttattttgtacatttctttgtttttagaaactgtatatatgtattgaggatattgaaaccataaccaccctcctgtcttccctacctaccgcattccaacacctactctccttctcagtttcatgtcctctagttctttaattatccagactccatatccccattgctaggagtcgtagctagggtcaccctcatagactcctgggagttttcattgcccttgtttctagctagtcccagagatgcccatctcctgtaaccagaaaagacttccaatggaggaactgggacaccaacccactcacaaaatctttagctcatagtttgtcctacctacaagatgtgcgggcataaaagatgaaacagaattagagagaagggcaaaccaatgactggcccagcttgacacctatgccatgagagggagcccactccgacactcttaataatattctcctatacatgcagacaggagcctagcatagctatcatctgagaggtttcacctagcattgatggaaacaaatgcagtgacccacagccaaacgttaagtggaacttggggaatcctatggaagagagtgaggatggattgaagatgcccagaggggtcatggtcacattgagaaatactacggaatcaactaacctgggcacataggttttcatatagactaaactttcaaccagaaatcatgcacaagacaagcctagaccctctgcacatatgtaacagttgtgcagctgggtcttcatgtgggactcctaaaaccgaagccagggctgtctctgactacattgcctgcctttggaagcctttctgctaactgggctgccttttctagtctcgagagaagaagatgtgcctagtcttactgcagcttgatatgtcaaggctggttgatatccaagggaggcctccccttttctgtggagaaatggaagaatgttagagaaggttggagggaagggagaaagagggattgggagcaaaggatgggggggggggcgctgcagtcagaatttaggataaataaataacttaatcaattcttaaaatgatttaagaaaaggatccacagaacctacttagttcagctcttgtgctcatgagtgtataactgcccactagagcttgagcaacctaccatgggacacacttttaaagaaaactaactcttaatcgcctggtatttgtcaacctgccaggagggcctcagctagggatgtggcctcttgaacacctgctctgtccatattggaatgtggattggtgtgatctcatgccagtcttgtgtcacaaccatagcttctgtgaaattatgaacacaaagatcctattatttttataatagataatttcactgtatttctctttggctcctgcctcttctgatctttccttctctcctccatggtgttccctgagttcttgaggggagtgtttcatggctggtactataaatctgaccacgaacccgtgccagggaggtcttagagcataggggaaaacacaggactattgtttgtttaaaagacagagtatcaaactgtcttctagacatttgtccttatacccatagaatagtgcagccttgcctctcattagagaagctcttttctcacttctctctcagagagcagagaactgggcgtgaccattgagggttcagccctaagtgggacaactctatcctagcatcattattcctaaaacaagagcatccccaaccaactgaggagcatcgtaagtgtggattttggccttgtgatcctgttacattggaccctgagatcatctgaagcatcacttgaagtctaccaccttgctcaaaagtaagcagttaagttcaggagcttcagggaataccaagatgcaggaaaaaaaaaagtcacactctacctctccgttttctctacctctgcttacagcagcaatccttttgctcagacttcctgtttctggcacttgccttcttctgtgatgttcatagttccctgtctgtggtttagcaggcacagagctggtttgggtctccctctctctcattcacttgcacatacaagcgtgcttcttctctattctttctctctctctctctctctctctctctctctctctctctctctcagaatgatggctctgggtagagctttcgctatagttttctgcttaattcaagctgtttctggagaaagtggaaatgcccaggatggtgagtcatttctaactccttttttaaaggatttcagattacctgtagcatatatgatcaagttacacagttctctaacagggcaagcaagaatttagcactaattaggttgttttgtgggtattaatcaccaggacagagggaatgatgacaatactgcaaatggcttgtaactctcaagaactgtcaagaagcattgagtttcattcaaattctggctcataaatgtggatgtatgctggtaatttcaaaaaagaaacctcatatcagttctttgttggagctttttggatgatcgcttccaaaactgtattagactgaaaaatcaagccattgttgttttgactgtttatggagttctaaaaccctagatacccatgataaattaatggccagaaacgagaggtttgtgtattcaccaaaactgtatttctagtgtctagagtttagaagttactctataatgtatttcttcaacatactttagctttggcagattcatgttagattgctgatgaataattcagtagtatgctaaggaaggtgtcttctttgaaatacacagggttgcttttatattcagagaatccattatatggtcatcataattctcctcagaatccataaaatacttagaccttgacttcttaaaaataggcattttaattacaggactgtactcaaacgtctctggcagacacagcagctacatggaatgtgaatctccaatttgtttctacaaattaattaaactgttttcatacacacacacacacacacacacacacacaccattaaaaggggaatgtgtgtgtgtgtgtctttgtgtatgtgcgtgtgtgtgtgtgtgtgtgtgtgtgtgtgtgtgtgtgcatcctgcctctggttcctgagtgctaggattaaaggcagacaccaccatggctggcctatatgtgcattcctaaactgggtgcagtagtacatccctgtagtcctgaagcctaagaggctgagacagaaaaatcatctttgttccagaccagttaaagctacattgcataagcttgtatcaaatacatctgtattttctttatgcacagtatcaatacacatcagcctagctctgtagtttagctcttcagtcaaatgcctttagttgtgcatcctaagcttagatatttgtgtgactttactttgtaatcagcaaggatggaaaacccttgcatgttcttatgaagagaatcatcagaggagtcacactcttcagcatgacggagcatgagtcacttggtgagggagagtcattatctcatgttaaatgtgtgcaaatagctggcaggaagcacgagaaccatgctgctgtttggtacaatcctttgcccctatgcttccctcttggccatgctatttcttacaaaaaaaaaaaaaaagtaaaaattcttgctgttaaacaggattttcacttcacctttttaaattttgaaatgtttttagattgatgatcataaccacccatatgcgtcacataggcatgtcacgatacctcccactttgtgctggcagcaatctactagtcaattttctagtaactaaaggatagtcaaatcaagcaaagggaaccgcaaaagccctgacagttcaagctcttcatcaagtaatcactgtcttctaaatgacactgccttacttagaatatgtattccaaatgctttaaatttctatacctagaatttttacttaatgcttagatgcttcctattgaacactgtgaccattgttccacataatgtcaaaaccacagtaagaataaaagcttccattgatatactacaattttttttcaaaaaaactccaaatgctgcatgtatatttgcataattataattcacatattgcctttcatactgatttctccaagactcctgggagagctctcacccttactgagaacttactgtaatgtaaatgaaacctctgtgcaaatccatccagtggcttctataatgtgtgtgtgcatatgaatatgggctttgagtgtctgtgtatgcagtaagagagcccagctacaaagttagaacagcaaagatcagtatgcatatccactctcagctaagagctctttagctcacagcagatagaatattctcccacaatggcatgtgactttcccccactgtgggttacagagcaattgtgccccagtagcaacatctgctaaagggtcaatggacaggtcattcagagacaactgctttgattgcggaaaacatggcgtgatcagctttttgcatattgtgtgagatagcttgagacatactttgtcagactgggtggctgaagtgtatagaggtccactcttcagctggtgtctgtcatctgcttaaagtatgctctctttgtctcctgtcataggtggaaatgttaggtaataaagatgaaccacaggatacctaaatccaaacagtaagtcatatctgttacagagagttggttacaggcacaagcaaagcacaagacagtatgagagctgagagctgtcatgtagggacaggcaacaacttctaccatacatcaagaaacttgatgatgggcctagtcggccatcactggaaagagaggcccattggacttgcaaactttataggccccagtacaggggaataccagggccaaaaagggggagtgggtgggcaggggagtgggggtgggtggatatgggggacttttggtatagcattggaaatgtaaatgagttaaatacctaataaaaaatggaaaaaaaaaaaaaaaaaaaagaaacttgatgatgttccaactgtgaaatgctaggctcttggaatgcctaggaagttaatttcccatagctgggaacagtcaccccagtctatgtttaggtgagctctgagatctgttctttactactgtcacttacctggttggccttttattaacccattttaattaatctttattaaaacagacctttggggtgtattagttaaagaggatgcaattgaaactgcatatagctgctaagccacccatctgaggccatggttagtacatcctgtttccatatgagaaccagaaaagtataatgtctctattttgggtgagattaaatacctagaagctgtcagaggctctctgcactccaccatcatgatataaacctttgataactctagaagattttccttgtccttattgaaatgcatttcctggaagatttttctgaatttttctgctaatatatatacacacatatatataaaacaccatatatatgtaaaaccatatatatataaaagatagatttttgtatacatgtatatgtgcacactttatgtatacatatgtatatattttatgtacatatacacacacaaatacctatttaattatgggctctacaagtcagcttaggaaatcaaataacatctttgacaaattgcagtcaccaaaaatggctacacatacaaaaaatttccatttcccacttgcttctagaatattactgatatgtgtagaatacagtagctgaaacaatctaaccatgtaggctaaaacctttcacccttggagttttctgatctatagttgcctcagtaggtcacttaagatgctctctgccacagaatggagtcatcaatattactgttaagttacaatgtccttttaggagacaataagcaatcccataaaaatgtgcacttggaaccagaatcattattgtcacctttcatttgaaaaggaacttggaaaagaacaaatgaagaccagcagagaaaaccaacattagattaggtggcatacaaatgaaatacaagatcccttatctgaaatatgtcaacacttcagtgtaaaaagataatttcaacattttaaagtctcactggggatttgttcattaacatttagcaccttctatatatgcgaggcattgccttccctgaacatgtaagataatttggctgaagtggagaatataatctcacataaatactttctaaatacagttttaaagtgtagcaaaggagctccaatataaacaaggaaacgggtttgtctatgccccttataattttccaacatactagtccaatgtagaactgtttaaatatacctggaacttgttcctccactatgatgatttctttttgttagaacactttgtaatctgtatgtgcacatcgggtttggcatatgtgtttcaggtatgtgtatttgtgtgtgtgtgagagagagacagagacagagagacagaggcagaggcagagacagaaagacagagagagcacattgaaactttttttctgtccttagaatatcttcctttagataaattatatataggtatataaatatatcgatatatattctctccttcatgtctgccactcaagtgacattttattaagggaatcagattttcagctgatacagtcatttgccttttctccttaacagctgtgttttgttcttctcaggagacctagaagatgcagacgcggacgatcactccttctggtgccacagccagttggaagtggatggaagtcaacatttattgacttgtgcttttaatgactcagacatcaacacagctaatctggaatttcaaatatggtgaggaagatagtttccatggtgcttaggaatccatctcctgtctctctctctcgctctctctgtgttccttccgggacttgcaaaggaaggagtgtctgtcctaagtatcaaactctaaaatttcctaggttctcaaaactttctgaaatactttgtcctttgccagaaattaaagtgaggcaactctcaattcattttttagttctcagaggcatatacaaatggtggtttgatcttggaaattctacatccctccatattcacagcaatctaaataaacacttcttctcctagaacactcccttaaggcagtgctctattttaaaattccattatgcagcgtaattacttgccttccagtcccaatgccaatgcttaataaccttttgacttgcagcaagttatgtaacatgaattctttagtttcttcatttaaaaaataattgaatgactagatctcacaggaaggttatggtgattaaacaattaaacaattaaatatatataaagagctcaaatcaacatccaatatttaattagtaatggagaaaagataattctgtgaatgtatgtataaaaatcacccacactgttgaaacagttgaattccagactatctagtcaatggaaaatttccagtaatctataggaccaagttgattcttgttttcatatggccctggaggaaatcaaagtgcaaagaaagctttaggtctgaaggttgataaagaactcagggagttgtatcttcttcctcccccaccagccatcgcttgttgccaagggttattatctctggtgacttgaagaaaaaatactctaatatgaaattctggcttgtggctatttccaaattcatatcagatgacctcattttttggtaagtttccatataaggaaagtatgtcgaggtctgcagtagtaaaagaggacttctgaagttccatgagcgctaaggaaatcctttgccgcctacaacccagataagctgtagattctcactcttctgaatctctagcagtttcctgaagctatacacaaagttttcctgaagtcactggaggaacaacgtcttggagttgaatgtcacagaataccctcagtctgtctttgttattgtatttttgtagcacactttctatggagaacaaggacacaaatatctaagatctagagatatgcctgagtcagtaaatgtcttgctatgcaagctggtggacctgagctgagctgagctgcctagaatctatgtaaaagctcagtgttgtgtctgccaccccacccccgagttgtgctgcagacaggggttatgaggatagatggatgtgtgagctttactagctagtcacgctagtccagccaatgagttccaggttcattgagagacactgtttcagaagcatagtgtgaatgacagaggaaaacccaagacattggcccacccaatgtgtgtgaacacatgaacacccacaagcatatgtatgtgcttacacatgtgcgcgcgcacacacacgcacacacacacacacacacacacacacacacacacacacacacaatggacatacaaacataccccacaatcaaaccaaaacaaaagacagatgttgagaatcattcctacaacttgataaataagttaattaactcatctaaacaatgttctcagttcttatggaaaaaaaaaaataccccttcacacagaggtttgactccgggttttcccacccggttcttagtgagctgtggtgagcactgttgtttcacttgaccaagccacagctgacctttgtgtccactttcgctcacatattcaatcatgttcttgcccactgtaacaaacttccctttagtgttttcattttcttttacatatactagtctctccagagcttcttcacattgttttccaggtggacagatatttgtttagaaagcctgatttaataggtgtgtgtgtgtgtgtgtgtgtgtgtgtgtgtgtgtgtgtgtgcacgcctgtacacacgtcttaaggtatacaatgtggaagaaaaggttgacatcaaatagctcaaaaagatttctaaatcactaacatttctgtgaggcatgcacactttcagtgggacatgtatgaaccttctaggttgagaagatgttaatgaaagagttccgaatttgtgtgtttcttcttctaaagggtactagcttttgtagaacatttgttgtctcttaatataaatgtatgaagtagaagttgggatttgctgaatttgtttatacaggtgattactggtagatgctaggacccttctctcagaatgtggtaaatttaacatctgtcctagatctggacaccaaactttggacaagaaatggactgtttggtttttgtttgtccatttgtttgtttgtttgtttgttttatttttcagtgaactgatctttggggagggaccaggtcaacaaagatcacagatatgaattactagtataccaatggactagttcacagtaggagataaaattattatgaatatatgaatactcattatgggctctggtcctgtaggaattagtggggaaatagtgaagagggtggaaaagtccagcagattacacaatagaataatccacaattatctaggggaaagtcctaccttttcttcactgaaattctagtcagttttctggtgcattagacaacaaagcagaaactctgaaagaggtacctgggatggaattccaatactaaagctaactagcccagtgaccagggagatattcagaccagcatcacagcaactgacttacactggattacatctggttaatgcctggcatgtgggaggtacctgtaaatggcacttgactccttcagtatgaacatttccacataaaataaatataggggaaaaagcaggggcaactatctgctacttttactaccaccaattggacaatctctcagtgcaattcacataaaaatattatttatcatcattcaaaagtcagatatgtcttttgggggggagctcattcaatttctatcactttccacaaaagcagtcatactctgttccacgttttctgggccctgatattactgccacatactacctacaactttgaatatctcactatttttctccatgactgtcacctttacaggccagctgatgttataccccttagcagtgatatctatcaagtattgttaagtattcagtcctctggacagtaaattatactatctctctaaattgttcagtattttcaagccatatcctgtctttcagggccatttttgttgttttgttttgtttgattgattgattgattgattgatcgatcgatcgattgatcgatggatagattttgttatattttgtttttctgccattttttcccttcagtctgaacatctgtttatataggtaagacaaatgcatctctcatactaaattgtacaagactggagaagaaagagaaaaatggaattaaaatttaggttaaatgatctttagccatcactctctacattcagaaccagatttgaaaatgtgacttagggccagtgtcccaagtcatggcatacaagatcagaatcatcaactatatatgtattacttgagtaataactgtgatcttccattgtcacacatattctagaacatctctagtcaatataaatataatgcagtccataaatctatgagcacattggtcattttaaatatttttaaattatatttttaataaatttagtgtttgtgtttgtgtatatgcatgtatatacacaaatgtgcatgcattgatgcacacgtatgtacgtgtgtatgtgtgtgtgtgtgtgtgcagaatacaggtgtcaccaattctctctttccattataggagttctgtagattaatccagagtcttacccactgagttatctggcaagcctcatctagcagcacatttttttcaaaaaatataacaaaatgaagttaattataacatgtgttatttaatttgatacactcaaaaattatttcaatatgtgctcaatataaatagtatactcagatactttatgctctttttatagaacatgttctaagggtacagtacatatacatttagaccatattgtaatttggactagccatatttcaaatgttttacaaatacatacaggagaagggctattgtgttggatagtagagattcaaaccatcactaagtcagccatctctaagacagttaaccaaataaatgtttgtaactgaactacatactcccactggtgctgataatgagtatcctcccactgtgtaagtaaagtcagtaacacaagcgaaagttggccattgtagtcagcttgctttactttaggtgccaacgtgacatataactgaatagtatactcatttacttaaaagatgttttaaatttaagtattggcataaagcccactagcctctgttctctctacattgcacaggtaccttgagctcagaaattggtatttcccccaatgttctctgtcacttctgttctaactcagcaaatcctggcagtatttctattaaacggttgttggtgacagacttctgagcttttcattcatctcatatctgtccacttgtatgtagttactatgttgcttttcagtttttactattttctgaacgatacatttcagggaggacattgcattcaatccacacacagagattctgagggtgtgggcttttgaacaactctctatcctgtcagtgggaagggaaggagacggggggggggggggaatagagggaggatctgcatgaggggttactaggagagagggaggctgatattgggatgtaaggtgaataaatgaatttaataaatataaaaaattaaattatatatgccaaaaataaacttacaatttcttcccttatctctagttttaataattgcatctggttttgacccatgtctaactttgccaaagctatgacgatacctttgtcttcctgtacaaagataggacaagagctatctaataaggattgaaaatgtgtaccatattcattcagtgatttgctactcagtagttataaagatgggatataagaaaataagcatcatctagaatgtaactcctaggcatgtgaccaagcggatgaaatcaagtatgaaagaatagtaatggtattgcattgctgacaaccactaccagctggaaaaactaagatgtggtagaagggagaattctggttcttccttaggaatcaggttaactgtcacacgctcaaaaggcaactgttcagtgtgaaagaaaattttgtaatctggttagttaataaacagtcacaacttggaaaatcttttaaaaaaagaaaaaataaatatcctataggtagaacttgactgatgtttgcatgtcatacacatttctcaaaaaccattggagatggacatattttgctacatgcaattccctccttcacctttaaaccctgcagtgaacaaagaagaaagtaggcaaggttaagtgagtaatgggggaaaactaaagaaataatgaagtcatgcattcttgctataaaaataaatgatacaggataaaaggaaaagtactagtttattctcttttcacaagttttaagtttaatgcccttccttttgaaatgtgtccttgtgaacttgttgcctgcatgctcttttttcttcaagcccagctaagtcatcctgaaaagaggaaaaactgggatcagttagaagtagacatcttgacagaatgcctctattcaagttgcttatacaaaatgaattcttcctactaatcagatacatgtgagtgtgtgagagtgtctgtgcacatttgtgtgtctatctgtgtgtctgtatgtgtgagagtaaaagacagtaattatgtacgtatctgtctctctgcctctgatgcccatccccgtgtgtgtgtgtgtgtgtgtgtgtgtatgtgtgtgcacatgtgtgtgcatgtatgagcacatgtgtgataagtcttgggaacgggtttggtgatttctttggtgaattgcgtgaatgtgcttcttttggtatatgttcaagacttggttactataaaaattgaaaatattatcttttacattattttcctatttttataggttaacctttagattttagatatatataaaattgtgtagaattaaggataatattaatacactatggtattcagagtcacctgtgttcattctattttttcagtgatgttttggtttttctgtattttcaaaatattgataaagttttgattagtatataaatctgttaggggaaaagctctaatttatcaataacaaatttgctagcacatgaacatagctcccatttatgtaaatttcttcaaatacctctttgaaatgttttgtaatttccagtacaaaggccttgaatatcctttataaatttcagttctaagtatttttatcctctactactatcacaaaggaattattatttttaaagttcattttctaattttgtgatgctatccatagaaatacagctaggggttttctggtagctttgatgaattcaattatttcctataattatgttggcagtctttataaatgtctatgtaaacagatagggttttttttctggaaataaatgtgctttctacttttcaactatgcttatacttgcatttgcttctcttctcttctgaattgaggagaacctcagtgtgctgcagtatatgagtgtacaaagagaactgtctcccttgccctgatctttacgttatgatttatattaaatttttataattgcatttgaataagtgtctttattctgtttcttgttgtttgggggagttttaatcatgaaataatatgtgattctatcaaaaattctatttctatgaaagatgagtaactttctagtgttttattctgttaatgtaaattatgccaatagatgattgaatgttgagccagctttgttttcttggtactcaccacacctgacataatacagtatgattattttgaagaccataataatacattttttgaaattattactctttaatcttttttatagtccagtcattatccccccctccggtccaccctctgacagttcctcatcccattcctccccagacctccccattccttggggcctcaagtttcttcagggttgggtcagaccaggccgttctctgtttatatacacatttttaagacactgttttatgtcttatgctggctcagacttactaagtggatgaggatgacctcaaacttctagtgttcttccctccatattttgatcattgtgattacaggtatattctgccataccagatttatgtagggctttgaggaaactaggtaagtattctacaagggagtcatatccccagtcctatgcatacagtcttgagggatggttttctttccagcattttgtaggtttgggtaccaattttaaactggcttcacagaataatacagatcatctctatttggggaagaaattcaatgatgctggtactgtatctttcttaaccatttggtagaactcagcatcctgaagtcctcaagcatgtagaattaactgtgagggaagatgttaatatccatgtgacttatattgtgacttagatagtttctatgaggttaagttttaagaatgttttcactttaaaaaatttacattcactctcacaaattgacgtatttcctatagttttaatatctatatgatatacaattgtgtctcctctgacatttcaagtattgttaacttataattttatacccatagtgtcatagaagttctatgtaagctgtgctggactcaaacccacagcaatccttatacttagactctcaaatgttaaggttatactcatggtccaccacacagaactttgcttccttttcttgacctattgtgttcagtttcattagccaaagtccgtatgaccctaggcatggtaatacatgctttcagcactatgttggatctctgtgagttcagggccagtctggtctacgtgatgaatttgagggtatatataaagaattctgtctcaaacaacaaaacacaacacaaaggctctatggaaacaccttgatttatttattaaatatatgtagttgcatatatacctcttcaaccaatttagcatttccgttcatcttatttgaagggatactatcaacatttctcacagttatcatacttttcatttgttcccaagagacgttgattacatttttacctaaacaaagtatttgcttctgatcaattctaaaactacatagatcttgctcttaatttccacaagcatgctttcaccacttcagacttatttgcacataataattgtgatagaacagaaaactgtgttattttaattcactctcgttttcctcctcaccattaacttgctgacttatgtacctgtagacactaaaattgaattcatacaactaaaggcacaatgttattttaattgtatacagaaaatcctacctaaatgaagacataactttttgtttctacagtggggctcttttacgagtgaaatgcctaactcttaacaagctgcaagatatatattttataaagacatcagaattcttactgattggtagcagcaatatatgtgtgaagcttggacaaaagaatttaacttgcaaaaatatggctataaacacaataggtaagaagttgtatatgatggtgtggtctctatggtttggatagctgcataaacgtgtctttgctttcagaatgataaaaatatgcaagtcataaaaacactttgtaataaacatgagcaactatttttgctcatttttaagaaatgaaaatctgatgttggaatcatgagttccttctgtgagaaaatatgctgagactattccaactcagctatgaaagagtgtctgacatcggtatgaggaatattgctaaagcaggccatctacctcagactcacatgtgctttctttttgtcattcattcttctgaaggtcttgaagtcttttctccatattcacatcatattccaaatgtgtatagctcattaacaaatcatttaaaaatatgctttccatgtttttcaaagttctacaagtgaaagaaaacttatgggtgggagataaatggatggatatttaagtaaatgataaatagattatatgtaggtagataaatcaatggatgatagatagatagatagatagatagatagatagatagatagatagatagatacatagatacatagatacatagatacatagatacatagatgggagacagattaactttaagaactgattcatatgattgaaacagtggtatgtttaaaatctttaggataagctagggggtataaatgcaggttaagtgtgaatgtttcagaactgagtccaagttcttaatgaaagaatgtattgcattcttgaatcatacctgtttctaataggaatttctacctttaaactaaaggtcttttactgatcagataatgcctactgattatggaaggtgtcaccccaaatctactcacatacattttaatcgtatcttatcatatctttttttttttttgtttttgtttttgtttttcgagacagggtttctctgtgtagccctggctgtcctggaacttactttgtagaccaggctggcctcaaactcagaaatttgcctgcctctgcctcccgaatgctggaattaaaggcgtgtgccaccaagtccagcttaatcgtatctttaaaatatcatttgattattgttcaactttttaaaagtaaatactatagcatagccattatgacctataatataattatatttccaatgagattaagtgaggaatgaaacagcataattgatttgacctagaatacacataattatattctgttaaacataagtagtaaaagcagttatattttaggttaaattataatttgaattaatgcaatgacatgttaactatttgtatttttctgcctttgggaatttacaagtgaagtttatatgagaaagcattaagaataatcacataaatgcaagtttgctgattttacaggctataaagtccctcccttatcaatgtctctttcactactctaaaagaaaagacaacagagctattctcactgaatatgagatacagtgagaaagttacttcatttgtttaatgattatggtaaagaaaaaatagaagttccatgtctaaacaatatcttagggaaagagcagaagtcacagaaatgaaatattcaacaaatggctttacatgttgaccacataatatcagcatgagctaggctgtcatgaaaggcagatgaggtaaggattccaatgtacaagatctctgggttttgagcataaacacggtggtgtttactcatttggagtaattatggatcagtgccgaatgtgtgcactacacaaaggtaccatatttaaatgttcatcgttcatagtgcagaggtttatttcttggagagtgagcagagagggtaccagttcttgatcctctaagaaaacactgcaacattgggagaacatctgttctcttgcttacattaggccatctaagcacacaaacttctgtaatcatgggaacacatagagcacacccacaggatctggagatagccaccccatccataggcccagctataccaaaatacctagtgctcatggaggaccatgtagcatcttccacatcagaccttaagactaccctcttatgtgaggggcaatgaggggaacacagatccctgtgaaaatatggtgtgggtccctcaggggtcctagaaagtacctgcactcctgagcaagtgggattaaaataagaagaatacttctcataggattatgtcctcctagttcttcaggagacatctcattcactgaattatcctttccacaaatttaaactaaatgttcctgattaatacctagaaccagaatcctagtcacctgcaactttctctcccacttccatttcttcagggacccctagcctataaggctggaggcctactttcctgccttcctgatttgttttaggcacattgataaaactgtctgggaccaaagctggatattacagcctggtacagatgttttcttagagaataaatacttttctctgggtttgggctgaatgatgtgacagttttctccatccaggaatgtatcttccaggacaaaatgcttctaaacacaactctgtgagacaggcagaggcctaggacacaaattggtttatttaactaaaagtgacaaaggaggacgtctggaggccactctggaatttgttagtcagggctaccatgaagactctacactcatttgtatctgaggtgaggtgcagaggtcccagatatatatatatccttgcaattctttacttaggagcccattagtaacacatcccctggtattccgatgtatataagtgatgatatttattttatgactatttaggacttcctccacatggtgacccaaccttctttcccataggactttagtatatacaaagataccaagataaggattatacatgggaggatttggtgccaagactggaactggtacctttctatctactcacaacagaaggctactccagccacaggaagggtctgacaatggtgtctggatgagaatcaaggagaaagatttggctttgttaatgaccagctccgaagatagaaagctctagggggatgggtttcagagaagaaggactttaaaacgtgtagttatcagcaattaatgaaaaggggttatgaatttgatgaaagagaacaaggaggctatctaggaagatttgaagggaggccaggaaagggggaaatgacataattacataatttttaaatgcacttatgtcctttttaaccccatacacagacttcatttcatttctttcttcctttctttttcttttctttctttctttttttatttcttttttgacagttaaagccgaggctccctctgacctgaaagtcgtttatcgcaaagaagcaaatgattttttggtgacatttaatgcacctcacttgaaaaagaaatatttaaaaaaagtaaagcatgatgtggcctaccgcccagcaaggggtgaaagcaactggacggtaatgtaaatcaatcacgttcacaaaataagtatcatcttgttctgttctcagaacttagccttcacttagagaggtcccctgggtcctacaccctcaggaccccaaatctcctgcatctttcttggctcctcttcattaaatttgctttagtttatctttatggtttgaacttagataagaatgtatgctcagataaacctgatccttgctctgcaaagcctccagtgtatgggataatcaggaagaaaagtggttctgcgtagcataaccaagaagtagccatgatttttccctaggacttttggggacaacaggaggtcagcagaagaaatcgtggaaggtttttctgtcactgttttttacgttaatgtctaagcattcagttgcagaaggaacggttagcttttctgctctgcgttttctggaggttaagtgaactccctcatggtctgctgaggttaagatgatcttgctggtcttaccatctctttgggagagaaacagaggatcctgggcacttgggattctcttagtctgccagatcaatctcagccctccctgtttcaaatagataaatagaagatggcttctctttctgaagaacaaaagaatgctcacatatgcccgatgccccctttactcagcctgggtcatcgttcttactttgcagtgtgctgaggcatgctacttacagatgtgcatttccatccaagccatctgctgtctttctctacctactccacagccacacacaaactggatggccttcatcctaccttctcccatccattgtctgactatgccaccagtggaaaagcaacattagaagaagaaagaagggttatgaatagatggttctaagataatcagcttactgtctgttaaaaaaagtaaataaaaatgtctagactctactggaggctgatttatgtcaatatacacaaatacaattgtaagtcaaataaaaattagtattaaactaccacagaactgctaacaaattgtctgtctatgtaaaatcattagttcatcattaagatagagacaaacattccaacaggtgaatgagccaaaaacttagaaaactgtcataactataaaacatataaattcagttaacatagtcaaatagatataaataacaatgggatactaattttgtctataagattaatataatatctttttcttagaaacaatagtgttggaaaaatcatgactttatgattatgtgtggtgtcaaatggcatctttctggaaggacatgactagtgttcactgcctaccctttgtttccctgtggtgcatggaaagagatagaaagaaaaaggagatgctggaacagaggagatagctgtgaacctaggagggggtgaaacccaccaaagtgagaaactaattcagctgagtacaaacccgtctaatcagtgttctctgacctcacctggtatcatttagagcctgcccccgattcggctgctgaacctctatagagctcaactccttcatttaagacatgaaagaacttccagaggctaccaacatgactgaaagccaacatgtccttttacttctaataacataacttctttttcaccctagcatgtatctttattccacacaagaacaacaatcccacagagaaaactacgaccaaaagcaatgtatgaaatcaaagtccgatccattccccataacgattacttcaaaggcttctggagcgagtggagtccaagttctaccttcgaaactccagaacccaagaatcaaggttggcaaagactgtccaagccctgtaccttccacaagacttcatattctgaagtgtagcagagagagggggaagaaatcagtgtaaataacccacaggtcaggagccctcttctactttctttgaagaatttttctgcctgccacctttgccatttttctgggaggagagcagtggcagctgagccatagtgcctgataatggataaagattgtcctgatgtcactgtctcagatgctcaggaatctactaatgaatctgcatgaatttcttacacactactctttccacctttgtcaggggtcatggctgatctctctgtgatccctctaggtaataaatatctttactactagaaaggaagtgggtcagtttggctatccattacatctcttttcccagaacaatgaagatgctatgggaaatactaacacccagagaagccagagagcatgcttcaggacagtacccaaagcaacttacctaaatcttctatttgaggggaatggaggttttccctgctgtacctgtgccctactttcattctggaattttctgcagcttcggggtgaacatttatctctttttctcttatttagactttttcccccttggatatgggtggttggataaaggtttctgggccatcatgaaaggtcatctttacatttcaagtagctgatgttcttcccactgtcaccgagatcagctcaactctttctctctatcaaagaactgtttctaagaaacaataagtgagacatgttattaagtaaaatcaaactaccctaaatatatacccacactttatgcttactgaatgctaaccgtgatctctccttatattccaggaggatgggatcctgtcttgccaagtgtcaccattctgagtttgttctctgtgtttttgttggtcatcttagcccatgtgctatggaaaaaaaggtgattttctttagtaaacaagagggttatttgtggagccccagaaaagcaggactcaggtaccatctagaaaagtttaaaataacagacttgacatttcaagaattatagtagcaaatatatgccctcctatttttagatcccagtcaatttaccatagttgatttcagaagaggcaaaaatatacaaactagacataagacaaacaatattgcacaaatattaatagtgtgtgtgtgtctgtacacatgtgcatctgtgcattgcatgtgtttgtgtatctgtgtctgtgtatatacacatgtgtgtgtgtgtgtgtgcgtgcgtgtgtgtatatgtgtgtgtgtgtgtgtgtatgtgtgtatgtgtgctgggtctgtctgtttgtttatctgtacatatatggttgtgttcatgtgtgtatacatgcaaatgtgtgctggcctacaggcagccaaactcaacacatattattttattcaattatcttccaccttgtctcttgatgcagggtcttccactaaacatgaaccttaccacccctgtcagattaattggtcagtaaactctgagtatctgtctgcctccaccactccacatatcatagagttacagatacatgttatcatacattgctatccaaactcagttcttcaaaattgtatgacaagaggtttatttattggattatttccctaggccatgacgcccccccccaaaaaaagaattctttaagaagtgttttccaaatattttttccacagcctcctaaaggacttagaggtgattacccatgctaacatggagtctatttgatctcatgactttctgcacacaaattcacatgatttttgtattttgctctgtggtagaaccatgccctgtgaattactcagtgttctaggaagttgccctcggcaattttgtattcctaggaccaaaagtgctctaatttgaaaaacgctaccataaaataattttcttgaatagcttagaacgtattcccaatttccactggaattaaagtaaaacctttacttccagtaaagacagtggataagatgacaataccaacagtgagcataaaagaccaggtctcattgtagctccatataaacaccaatactgcctccctgcaaacctcactcttcgctttagggtactttgcaacataattacattgtctcattcacaatagatcgttagcaaggagctctgttctatccactccttaaaccaagagcatgatactgtcagagaaaataaggtgtttgtccagtaacagaaatgttttcacaatctacctcaaataaggtgaaagagttgtttgtgtgccttctccttctgccgtttgtttcaagtatgaatgttctctggttttaggattaaacctgtcgtatggcctagtctccccgatcataagaaaactctggaacaactatgtaagaagccaaaaacggtaattgcttgaggtggggaaagaaacaccataatgttgaaatcttagtctaagaatgattaagactgacactcaacttacggtcttttatatatcacataaatgaaagtccttttaagactctgaagaataaagccaagatatgccacagggcagggggttggggaaaaatcaatatttacttcaaagttggagtatcacagctcagtcagaagtgaagccaactgtcattttttcacatcgtgtgtcaattttacaagaaagtttcgtaaacgttttagtttcctgaatcaaatgtatagcagcgcctctttgccacgcctctaacgcttctgcctttctctgcagagtctgaatgtgagtttcaatcccgaaagtttcctggactgccagattcatgaggtgaaaggcgttgaagccagggacgaggtggaaagttttctgcccaatgatcttcctgcacagccagaggagttggagacacagggacacagagccgctgtacacagtgcaaaccgctcgcctgagacttcagtcagcccaccagaaacagttagaagagagtcacccttaagatgcctggctagaaatctgagtacctgcaatgcccctccactcctttcctctaggtcccctgactacagagatggtgacagaaataggcctcctgtgtatcaagacttgctgccaaactctggaaacacaaatgtccctgtccctgtccctcaaccattgcctttccagtcgggaatcctgataccagtttctcagagacagcccatctccacttcctcagtactgaatcaagaagaagcgtatgtcaccatgtctagtttttaccaaaacaaatgaattataagaaaacccttccatcgacaaccaaatgatcactgagatggaaagtctggaatgcttgctctcccccgtagctcacagaagagaaagtcaacgtgaccttgctacacatcttcagcattctaagaaatcattttgctcttctagctcagaagcatttgcacaaagcaggaagaatctgttttccctgttgttggattagtcataagagtccatatgacccaattaaaattgcaaaactcagttaagtgaagaaagaaagatagacaaaagaagatagaaggatgtggtgaatgcaggaagaagaaaatgaaagatgtgagtggtgggtctatcattcaaattgactatttatccagcactataccactcttctcatttcttcctcacaataatattacaatgtgggcttatccattataacttttattttctttgtcatagatgctgaagttgaaagtagagattttaagtgatatccaaatttttctttcagctacagatgaggcacacattccaacttcaaccctctcttgccatgaacctgtcctattgttgagtgtcaaacatcaccactaagtggatggttatgtagtccattatccaaactgagtcgttttggaaagaaaaagttagacataattaacagtaagcataaactgtatatgtctaagagagatgtggatggatggtcattttacttaaagtggctatagggatgaacatgaaggacaaagtacatttatgggtgtggcataccatgaccatgtgtcaaaggaagtgggaaaaagaaaaaaaaagcaccaagatcatttgattttgttttgttgttttgtttgaaaacaaactcaagaagcaatgagttagaagccgagaagttccagagtcagttatcaagaccatgattttcctgctgctattatccattggcttctctgtgacattgtaggaggaactatggccaatctacaggagttcaacatttaacagtgaatggagtcctcctatgtgagtcctcctatgtgtggagacaccattaagaactaccccaagttctacatctctggatattgcctgaactacagaaaaagggggctgcgcacaccacaatgagtgccctacctgaaactatgctcacagaaacacaaagaagatgggtaagttattcaaattcaaatgttgatttatgactgcaagtcacaattttgaatccctgctgtgtataaccaatctcctgaagaaaacaacaaataactgaaagatactgtggttgggtgccttagcattaaaattctgtttaagtgttgacattgtttatttggattggagtgtctgtccggtcatgtattgtatccatgcattatattcagataaccacaacagctgctaatgcttgattatattctcagggactgcatgcaatgtaacattactggttggttctgccaattttcctcttggtatttataaaggaaaaccaaaactcttggtcagagacaatatgcaaaacagagatgtcaagtactatgtccaaatactgtgaaatataatgagaaataggtaacaaatttatcaatcaactatgtttggatccagggaatctcaagttattcaattcattctctgtaagcctttgtctctctcttcatccagacttttgccttcaaatacaagcatgcgctattttctggaattgatacagcactgttcattttgtgtgtgtgtgtgtgtatgtgtgtgtgtgtgtgtgtgtgtgtgtgtgtgtgtgtgtatgtgagagagagagagagagagagagagagagagagagagagagagagagctcagcagtttttctctggtgttctttaatacatccaccattcactacagtgaagatctctgggttgactgtacactttttaaaatgaattagtagtattctctaatgatgttacacagagaaatgtatggtgtgtgttaccatttcatgttcaactaaatgctaaggtactctgtggctaaaatactctctgtaactgtggcaactacatgtaaataaatgggctctacagttcagcacagacttcttgagctactgaaaatattcttagaccatttaaaaggttaagattgtcagaaagatagttttaaattaattcaataatgaactaatagccatttattgagaagccataatgccttacttaaacactatgctggctactaaacaatggaacgagatactccaagctcacagttttatgcagaaaaaaaaaacagactaatattaaaatgtcacattcatgtttcatgccaaatatcagtcaggattcttagtatttagcaaagtaagtttatttgaagcagaaagagagtttcctaaaaatattaaatggttcacagaacagctgggagggtgaaagccagttttgcaggtcacagtgtctccctgtatctctgagactgatgagtctacagtctgaaaatagtccccttcacttgggtcccctgctcctgggaagtcttagcaatgacacccagtgacttcacactatagactgccggagtatgacagagctacagactgtggatgacagcagcaagctttgcccttgtgtgggccatagagatatataagagaaccactagtatttaagtatacagtaagaggcaagcattgctataggagtagggatgggttcccaatatacaatgaagattccactgttaggacagaagaaaggaaaaaaaacaggtatcaaggacagagaaatgacacggcagctatgagcactggctgttcttcagactcagaggacccaagttcaattcccagtattacaattatgattcagcactatctgtaacttctttttgcaggaatgcaacaccctattctggcctctctggacaccaggagtgcatgtgatacacagatgtagatgcaaataaaacacccacacatggataaaattataacttgtaaaatgattttaaaaataggtaaagactatatggaagaagatataagcaagggcaacatgaaggtcacatttcatatggtaactcaaggcactggagtgtaccaagtagctgagcctcgagagggctgaggcttttatcaatataggaaaagtgatccatggaggtgtgagcaaaagcattcagaggaatgttcagcatagcaacttgtaaaacaccaagaaggaagataaatcacatttccctaaaataacataactcatcttgaatgtttactttaaacatgtctatacattctgttgtatgttggtcagtttgggctacttaaccaatgcactgtgatacaggtaacttaaaacattagttgcatatgtagcagaggatgccctagtcggccatcaatgggagaagaggcccttggtattgcgaagatcatatgccccagtacaggtgaatgccagggccaggaagtgggagtgggtgggttgggaagcagggcatggggagagtataggcttttggatatcatttgaaatgtaaatgaagaaaatgtctatacctctcctgggcatatatccagaagatgttccagccagtaagaaggacacatgctccactatgttcatagcagccttatttataatagccagaagctggaaataacccagatgcccctcaacagaggaatagatacagaaaatgtggtacatttacacaatggagtactactcagctattaaaaagaatgaatttatgaaattcctaggcaaatggattgacctggagggcatcatcctgagtgaggtaacccaatcacaaaagaactctcatgatatgtgctcactgataagtggatattagcccagaaacttagaatatccaagatacaagatacaatttgcaaaacaacatgaaactcaagaagaacaaagaccaaagtgtggacactttgccccttctgagaattgagaacaaaacacccatggaaggagttacagagacaaagtttggagctgagatgaaaggatggaccatctagagactgccatacccggggatttatcccataatcagcctccaaacgctgacaccattgcatacactagcaagattttgctgaaaggaccctgatatagctgtctcttgtgaagctatgccagagcctagcaaacacagaagtggaggctcacagtcagctagtggatgaatcacagggcccccaatggaggagctagagaaagtacccaaggagctaaagggatctgcaaccctataggtggaacaacaatatgaactaaccaatacccctggacctcttgtttctagttgcatatgtatcagaagatggcttagtcagacatcagtggaaagagaagcccattggtcttgcaaactttatctgcctcagtacaggggaacaccagggccaagaagtgggagtcgggggtaggagagtggggtgggggggggaggttgtgcggaacttttgggatagcattgcaaatgtaaatgaagaaaatacctaataataataataataataataaaatttcttaaaaacaaaaacaaaaacagaaagttgcctccggtccgccatctgtaccagggacctgatgctgttccacagctcactgtgtacaggtcccaccaggagagagctgatctctcaggagtgctgacacagtcttatatacccactggagggacaagtcccagtcagagacagcaagaccatctaacagcagagacaacaggatggcaagaaggcaaagacaagaatcttatcaacagaaaccaaggctacttggcataatcaaaactcagttctcccaccacagtaagtcctggatatcccaacacactggaaaagcaagatgtggatttaaattcatatcttgtgaagctcatagaggattttaagaagaacataaatcttacacgcgttcacgaccggccagggaagacgcaacaaaccggaatcttctgcggcaaagctttattgcttacatcttcaggagccagagagcaagagagcaagagctctattgcttacatctttaggagccagagcgcaagagagcaagagtgtaagagagcaaaagcaagagagagaatggcgaaaccccgtcccttttaaggagaattatcctccgcctaggacgtgtcactccctgattggctgcagccaatcggccgagttgtcatcacagggaaggcagagcacatggggtggagaactacccttggcacatgcgcagattatttgtttaccacttagaacacaggatgtcagcgccatcttgtaacggctaatgtgagggcggctccccacagatcccccttttcttttaataagagcaataggccacccatattaatgagagtggagatagaggtcaaatccccagtgtgcaggtaaaggagctgtacacataacctcctctcaggctcatcacccagaggggtcctggtctggtcccgtgtcgttttgcctggggagaaggacacttgaacactcaaccttcttgaaagatgacatgtctccctagaataggctcatatatgccgcagagcccttctactgcagtgcttagccatgcaactctctcgggctgttgaagcacactcactctagcccgtgcaatgagactagcctcgtggggtgcaagagctgaatggccagcgacctattgcttaagcatagatatatcaggggaagcaccatgttctagtactgtaagtgcctgggcaataaccaccttgtctctcctagtttgggccttaagcttacagaccaaccaaagaagcaacactaatccacagcaaagtgtatctccaaataatcccacccatacccattctttaaagaaggaaaatgctgaggagatccaattgggtaatcctttggtcagggacaggtccaagcgcgtggagttgacctgaagtctcaattcccaaagagtctgttcaaattcagccgtccaattctgtaacatatactgagaaagactttttgacaaattagctgccctagtaaatttctcatactgaatggaagtaacggacaatcccggaaacttttgttcacatcccagctgagctatttgccataatacatctagttgttcctggacaagatctatgcattgattaaccagcatgagacctccctgtatcttgacattagctgaggcctgtttatctatgactgtggtcaccgaggctgacaatgtgttaatggtgtcagtcgtctggacctgtccagacagagccaaggctgtctgaatcaaggccaaacccagttccttgttactggggaaaaagcaggggaatacttgagcattatacatcaccggcattgggagtggaaatgtcgacattatcccccaatgctgctctctctttgttattgtcgccctggacatcaccaagacgagggacatcagtattcccttggtcagtctggatttttcgagtgactctttctggtatccaaaatgggttgtcttcattctgtggaaaaacacaaacagctcccctggatcttatcaaaataggatccgggccataccatttattatcaaggacatttttccatttaaccatctcattgggcctatctggctctgaacaatgacgttcagccgcagtatggccatgagcatcaagatttaaaaaattgagtgtaaagagtgccatagacacagacactcttggtactcggggtagagcctcgactccccttttctgttttaatagataggatttgagggtgcgatgcgcacgctcaacaataccctgtccttgagggttgtatggaagtccagtcaggtgggtcacgtccatctgacggcagaactgctggaatttttgagatgtataagctggtccattatcagtcttaaggagtttgggtttcccccaagcactccatgcctcaaggcaatgttgaatcacatgtgaggccttttcacctgttaaaggtgtggcaaacattacaccagagcaggtgtcaatagaaacatgtaaatattgatttctcccaaaggaggaaatatgcgtgacatccatttgtcagacctgtaatggcctgacgccacgagggtttacccctacatgagtagataaaatttgacaacaatctaaaggcattattaagtaatcagaatcattttcagtagaaccaatccctctggcagctcgaggaatactagaggaaggaaaaacagccatgtaggcttgccaaaattattagttgagctattctgtccccttgtgatatagaaaagacaacttgaggacaagaacagagaacctgaagttcccctttataatcctgatctacaactccagggtggacaataagaccttgtaggctgcaagagcctgcctctgtcattctggccacaaaatctgagaaggactcctgaggtccctggacgatctttgttagttgtccagtggcttcacctgctcgggagagtgccttccaggccctaatagccttttcatctgattcagaactactaagaactggctccttgagctcatctagtgatgagtataggctgcttctcctagagacctccgctaattgatctttttgcttttcttttttcttttccttccttctaatctctccccaggtattcttacctgacctaaacttttcctcgggttcaagacccgtggaaaggcctgtatacttattttgtgtaccatatttcctctttgctcctactctctctccccgctttacttctgatagattgccctgaatttcatccagaattttcagccctgccttaactgcttgataacatgtgaaaaggaacaaaaaggctcctaacactagaaaaagttcaaggccaaacataccttgtaaagctatttcccactttacttctgatagactgtcttgaatttcgttagaaagttcaaggccagacgtaccttgtaaagctatttcccactttacttctgataggctgtcttgaatttcgttagaaagttcaaggccagacttaccttgtaaagctatacttacgggtaccctgttccccagctgaagagttctgaattcacgcagttgaatccttctcaacagtctgttttacgggaacacttcattaccaccgttccccagctgaggagttctgaatccaggccgaatccttctcaacagtctgttttacgggaacacttcattaccatgacctgcagttctggttccggaatgagggatcttccttgcgccggtgatggtaactgtcccgggttttctcgtcccgggtcttctcgtcccgggtctcagcaccaactcttacacacgttctcgcgaccggccaggaagaacgcagcaaaccagaatcttctgcggcaaagctttattgcttacatcttcaggagccagagagcaagagagcaagagctctattgcttacatctttaggagccagagcgcaagagagcaagagtgtaagagtgtaaaagcaagagagagaatggcgaaaccccgtcccttttaaggagaattatcctccgcctaggacgtgtcactccctgattggctgcagcccatcggccgagttgtcatcacggggaaggcagagcacatggggtggagaactacccttggcacatgcgcagattatttgtttaccacttagaacacaggatgtcagcgccatcttgtaacggctaatgtgagggcggctccccacacataaagaaatacaggaaaacacaggcaaacagctagaagcacttaaagaggaaacacaaaaatcccccaaagaattaaggggaaatacaaacaaacaggtgaagtaattgaacaaagccatccaagatctaaaaatggaaatagaaacaataaagaaatcaaaaagggagacagctctggagatagaaaacctaggaaagagatcgggagtcatagatgcaagcatcaccaacagaatacaagagatagaagaatcacagttgcagaagataccatagaaaacattgacacaacagtcaaagaaaatgcaaaatgcaaatagatcctaccccaaacttccaggaaatccagtacacaatgagaagaccaaacctaaggttaatatttatggaagagagcaaagattcccaacttaaagggccagtaaatatcttcgacaaaattatagaagaaaacttccctaacctaaagagattcccatgaacatacaagaagcctacagaacaccaaatatattggaccagaaaagaaattcctcccatcacataataatcaaaacaccaaatacataaacaaagaaagaatattaaaagcagtaggggaaaattttcaagtaacacataaagtctgacctattagaattataccagctttcccgccagagactatgaaagccagaagatcctaggcagatgtcatacagaccttaagagaacacaaatgctggcccaggcttctatactcagtaaaactctcagttagcatagctggggaaacaaagatattccatgacaaaaacaaatttacacagtatctctccacaaatctagcccttcaaaataaaatagatggaaaactccaacacaaggagagaaactacaccctagggaaaaaaaaacaagaaaataatcttgttttactcagcaattaaaaagaatgaatttatgaaattcttaggcaaatggatgtatctggagggcatcatcctgagtgaggtaacccaatcacaaaagaacatacaagatataaactcactgataagcagatattagcccagaaacttagaatatccaagatataatttgcaaaacacgtgaaactcaagaagaaggaagaccaaattgtggatacttggttccttcttagaatggggaacaaaatacccatggaaggaattacagagacaaagttcagagctcacacagaagaaaggaccatccagagactgccccaccatggggatccatcccatatactaccaccaaacccagacactattgcatatggcagaaagattttgctgacaggaccctgacatagctctctcttgtgaggctatgccagtgcctgaaaatacaaaagtggatgctcacagtcatctattggatggaacacagggcccctaatgaaggagctagagaaagtaccaaaggatctaaaggggtctgtaaccctataggaggagcaatagtatgaactaaccagtaccccccaaatctgtgtctctagttgcatatgtagcagagaatagcttagtaggccatcaatggaaggagaggcccttggtcttgcaaagatcatatgccccagtacagggaaatgccagggccaggaagcgggagtgggtgggttggggaacagggccaggggagggtatagggagctttggggatagcatttgaaatgtaaatgaagaaaatatttaataaaaaaatgtatgtcaaaaaaaaaaaaaaagaaaagcctaaaagaagatagctgcaagaagagaatcccaactctaacaacaaaaatgacaggaagcagcagtcactttaacgtaatagctctttaacgtcagtggactcaattccccaataaaaagacatagactaacagaatggatatgtaaacatgactcagcattttgctgcatacaggaagccaacttcagtgacaaagacagacactacctcagagtaaaaatgtggaaaaaattctgcaggcaaatggccccaagaaataagctagagtagccattctaatatcaaataaaattgactttcaacctaaagttatcaaaaaagataaggaaggacaattcatactggtcaaaggaaaaatctaccaataactctcaattctgaacatctatgctactagtgcaaaggcacccacattcataaaagaaactttactatagctcaaagcacatgttgtacctctcacaataatagtgtgagacttcagcattgtactctcagcaatggacagatcatggaaacagaaactaaacagagacacagtgaaactaacagaatttatgaaccaaatggttttaaccgatatctatagaatatttcatcctaaagcaaaagaatataccttcttctcaacagctcatgctaccttatccaaaattgaccataaaatttataatgaaacaggtctcaacagattcaagaagattgaaataatcccatgcatcctatcaggtcatcacagactaagactggtcatcaacaacaacataaacaatagaaagaccacatacatgtggaagctgaacaacactctactcaatgataacttggtaaaggaagaaataaagagactttttagagtttaatgaaaatgaagccacaacatacccaaatttatgagacacaatgaaagcagtgctaagaggaaaactcatagctctgagtgcctctcaaaagaagctagagcaagtatacagtagcagcttgacagcatatctgagagctctagaacaaaaagaagcaaatatacccaagaggagttgaaggcagaaaataatcaaactgagggctgaagtcaaccaagtagaaacaaaaagaactatacaaagaatcaaacaaaccaggagctggttccttgagaaaaacaagatagataaacccttagtcagactaaccagagggcacaaagacattatccaaatttacaaaatcagaaaatgaaagggagacataagaacagaaaccagaaatggaggaaatcc

SEQ ID NO: 1239 - DNA, 3190 bp, Mus musculus
agagctggtttgggtctccctctctctcattcacttgcacatacaagcgtgcttcttctctattctttctctctctctctctctctctctctctctctctctctctctctcagaatgatggctctgggtagagctttcgctatagttttctgcttaattcaagctgtttctggagaaagtggaaatgcccaggatggagacctagaagatgcagacgcggacgatcactccttctggtgccacagccagttggaagtggatggaagtcaacatttattgacttgtgcttttaatgactcagacatcaacacagctaatctggaatttcaaatatgtggggctcttttacgagtgaaatgcctaactcttaacaagctgcaagatatatattttataaagacatcagaattcttactgattggtagcagcaatatatgtgtgaagcttggacaaaagaatttaacttgcaaaaatatggctataaacacaatagttaaagccgaggctccctctgacctgaaagtcgtttatcgcaaagaagcaaatgattttttggtgacatttaatgcacctcacttgaaaaagaaatatttaaaaaaagtaaagcatgatgtggcctaccgcccagcaaggggtgaaagcaactggacgcatgtatctttattccacacaagaacaacaatcccacagagaaaactacgaccaaaagcaatgtatgaaatcaaagtccgatccattccccataacgattacttcaaaggcttctggagcgagtggagtccaagttctaccttcgaaactccagaacccaagaatcaaggaggatgggatcctgtcttgccaagtgtcaccattctgagtttgttctctgtgtttttgttggtcatcttagcccatgtgctatggaaaaaaaggattaaacctgtcgtatggcctagtctccccgatcataagaaaactctggaacaactatgtaagaagccaaaaacgagtctgaatgtgagtttcaatcccgaaagtttcctggactgccagattcatgaggtgaaaggcgttgaagccagggacgaggtggaaagttttctgcccaatgatcttcctgcacagccagaggagttggagacacagggacacagagccgctgtacacagtgcaaaccgctcgcctgagacttcagtcagcccaccagaaacagttagaagagagtcacccttaagatgcctggctagaaatctgagtacctgcaatgcccctccactcctttcctctaggtcccctgactacagagatggtgacagaaataggcctcctgtgtatcaagacttgctgccaaactctggaaacacaaatgtccctgtccctgtccctcaaccattgcctttccagtcgggaatcctgataccagtttctcagagacagcccatctccacttcctcagtactgaatcaagaagaagcgtatgtcaccatgtctagtttttaccaaaacaaatgaattataagaaaacccttccatcgacaaccaaatgatcactgagatggaaagtctggaatgcttgctctcccccgtagctcacagaagagaaagtcaacgtgaccttgctacacatcttcagcattctaagaaatcattttgctcttctagctcagaagcatttgcacaaagcaggaagaatctgttttccctgttgttggattagtcataagagtccatatgacccaattaaaattgcaaaactcagttaagtgaagaaagaaagatagacaaaagaagatagaaggatgtggtgaatgcaggaagaagaaaatgaaagatgtgagtggtgggtctatcattcaaattgactatttatccagcactataccactcttctcatttcttcctcacaataatattacaatgtgggcttatccattataacttttattttctttgtcatagatgctgaagttgaaagtagagattttaagtgatatccaaatttttctttcagctacagatgaggcacacattccaacttcaaccctctcttgccatgaacctgtcctattgttgagtgtcaaacatcaccactaagtggatggttatgtagtccattatccaaactgagtcgttttggaaagaaaaagttagacataattaacagtaagcataaactgtatatgtctaagagagatgtggatggatggtcattttacttaaagtggctatagggatgaacatgaaggacaaagtacatttatgggtgtggcataccatgaccatgtgtcaaaggaagtgggaaaaagaaaaaaaaagcaccaagatcatttgattttgttttgttgttttgtttgaaaacaaactcaagaagcaatgagttagaagccgagaagttccagagtcagttatcaagaccatgattttcctgctgctattatccattggcttctctgtgacattgtaggaggaactatggccaatctacaggagttcaacatttaacagtgaatggagtcctcctatgtgagtcctcctatgtgtggagacaccattaagaactaccccaagttctacatctctggatattgcctgaactacagaaaaagggggctgcgcacaccacaatgagtgccctacctgaaactatgctcacagaaacacaaagaagatgggtaagttattcaaattcaaatgttgatttatgactgcaagtcacaattttgaatccctgctgtgtataaccaatctcctgaagaaaacaacaaataactgaaagatactgtggttgggtgccttagcattaaaattctgtttaagtgttgacattgtttatttggattggagtgtctgtccggtcatgtattgtatccatgcattatattcagataaccacaacagctgctaatgcttgattatattctcagggactgcatgcaatgtaacattactggttggttctgccaattttcctcttggtatttataaaggaaaaccaaaactcttggtcagagacaatatgcaaaacagagatgtcaagtactatgtccaaatactgtgaaatataatgagaaataggtaacaaatttatcaatcaactatgtttggatccagggaatctcaagttattcaattcattctctgtaagcctttgtctctctcttcatccagacttttgccttcaaatacaagcatgcgctattttctggaa

SEQ ID NO: 1240 - protein, 457 aa, Mus musculus
MMALGRAFAIVFCLIQAVSGESGNAQDGDLEDADADDHSFWCHSQLEVDGSQHLLTCAFNDSDINTANLEFQICGALLRVKCLTLNKLQDIYFIKTSEFLLIGSSNICVKLGQKNLTCKNMAINTIVKAEAPSDLKVVYRKEANDFLVTFNAPHLKKKYLKKVKHDVAYRPRESNWTHVSLFHTRTTIPQRKLRPKAMYEIKVRSIPHNDYFKGFWSEWSPSSTFETPEPKNQGGWDPVLPSVTILSLFSVFLLVILAHVLWKKRIKPVVWPSLPDHKKTLEQLCKKPKTSLNVSFNPESFLDCQIHEVKGVEARDEVESFLPNDLPAQPEELETQGHRAAVHSANRSPETSVSPPETVRRESPLRCLARNLSTCNAPPLLSSRSPDYRDGDRNRPPVYQDLLPNSGNTNVPVPVPQPLPFQSGILIPVSQRQPISTSSVLNQEEAYVTMSSFYQNK

SEQ ID NO: 1241 - DNA, 38429 bp, Homo sapiens
  misc_feature (1)...(38429): n = A,T,C or G
tccattctctccttctttctttaactaatagtacctccaattttagttgggcatatagcaaacctctcttcagactgtattacccttcatctcttgcagctaaagtgcccacagtgactactttctggccacaatgttatgagcagaagtaactttcagatcatgtccttaaaagggaaccccgtcactttctcctttttgtctactctcccagagaggaaatgggatcatggtgctggtaagctaacctcaaatcaatacgtagacaagagcagccacctaggaaatgaaatatagaccgggttcctaattgtgtgagctcacggagctgcctgcctgctgtggataatccactaattgagagagcaataaatttgcatccttgctagagccgctatgtttgtgggtctccctgttttggcagcatagctcaactaacacatataacaaaaaaaaaatcctttattaaattccaaagtttcctaagaccgatgataaagtgaaagcaaaagttggcagtacattaccattttcttggaaagcctctggaaagaatgattgtatcttaatcacttagcccaggggtatgcagtgtgaccaaagacagagcccttgttcctgcttttttaggaacacctgctgattctctgtgacaattccatgagcagtataactgagggtcgcttttaaggttgactttacttttttttttcttgagacagggtctcactccgtcacccaggctggagtgcagtggtgccatctctgctcactgcagcctcaaccttccaggctcaggtgatcctcccacctcagcctcctgagtagcttacaggtgcacaccatcacacctgattaattttttgtatttttggtagagacagggtttcaccatattgcccaggctgggactttgcatattaagcttgggaaattttaggctagcagagttgttcttggggactccatttgcacagaggactgggttctaagagagcagaggaagcttcagagtagaattgaggactcttgccagttctcccagtggtccagatttggaaacgacctgcagggtgtggccaccaactgtggtccctcaggaaccactctgcaggaatggagcttaccctgaggcaagtactgtgtgcaggggcacgggccagaacccagaatggggttgcttgatccagacttttctcagaaacacactggggcactgtgtccgacagtggagtgggcagccggagctgctgtgaactgtttgtccactgggaaggccagagagggagacactgagctgcagggacaccacactggctcccgctgcccaaaggggcactgtgactcagcctttgccagaaggcataccactctcaccactcttcccagggtcagccctcttgttcactgttttatcaaaatgtgggcatgtactgaaattgaaataccactcactttctggcagaaatgtcgtcagcaaagagtgaaatgttggtactcaaagtttccatttttattgcatccagagacagaggctaaaatctcataaaggtgaaaatagtatgacatttcaaactctgcccagaaagaagacaaatggcagcaagacatgaggctgaagacgtgggggaaggaggaaagggaaatgaaagaagagccacaacaaggaaaatgtcatgctcctggaaatgaaacttcaaagatgctgggactccccctcagaatcgtagggactgactcagcacatgtttatcaaatgctagagactattcatttaggaccagagtggcattagctttcctacagccatcctcacctgcttgacacccttggatgttgggtttttttgtttgtttgtttgtttgtttgttgtttttttgtccacagctcttgtggtccccagcctctctcttgagcagggctggctttttttttttaataagatagctggtgcccaagattgttttccaccttaaggataaaacctgttaagaaaggtaagttgacagtaggtgggggcaggtcatacagattttatgacacatagaatgtgttttcagtatttttcaaacatcagattttacccaggatattactgttgcaacatttactgcctgttattattgctgtttcacttattgtccttcaatatatagtcccaaggtgagtgacttttaaatcatcctcatttaggacaaattgctaaaggcttaaggactattttataagcttcatctaaaaactgagtcagaggaatgcttttgtccttgaaacattttgtttcccagggttctcatgatacactggtatctgtccaactaaattcataatttctgtagagaatagagtcaaaatttctgttcctaatagatggatccagatagtaaacactagtaataagacaagatgctcagcctgaattttcccaggaaaacctttgtctttactaatcagaaaaaaaaaaaaaaaggaagatctgggctagatttttatccagttaacaaacaacaaacaaccaaataatggatacacccctctaacattttaggatctcaatctcgttaaaagataagttctcttaacttgctaggactctaccggttatataggaacaccacagaacttattgcaatctgaagataaaagaaagtcttttttgtgttttgcctgttgggcaaatagcctgaacaattacaaaaaaggaagaaaaggagacttggccaactggtgtcaggagtcttaacaaggtcagtgtgttctgcttgtgtatgagaaagaatcaaatggctttttttttttttttttttttgaggcagactgtcactctgtcacccaggctacagtggagtggtgcaatctcagttcactgcgcaatctcggttcactgcagccctgagtagccaagactacaggcgggccccaccacacctgactaagttttctattttctgcagagacagagtctcactatgtttactagggctggtcttgaactcctgagctcaagtgatctgcccacctcagcttcccaaggtgttgggattacaggcatgagccactgcacccagctggctttcctttttaatgattcactacatcatacaaactcatcaaactgaaggaagacaaagtacaaaagagagacgagaaaatgtagccatgaaaggaagtgatgggtgaagaggaggagaagaaatatggccaagtcagttgccatgccaaactgcttgcttctaccacagtccaatgcttccctcctgatttcacatttggagacttgagtgtccccaaatagtgttcctcatcctcttttcttctttctgtgcttgtctcacaaaagtaatgacaaagtaatatagtaaatgtttgttacctgggggatagggtgaactaggtggttcttcctcagcttttctaagtctccaaaggactaacaagacctgagtgaggaaagagagaaggcactgttgttcccccacaatctctagaaggactggtgacgcatgtcatttttctttgagctccccacactttaggcttctctctgaggtcttttcagcatctcctgccccacccaagagtaagcacccctgtggaaatccccagaacaaaccagcacatgctgtaccaaaatattgtgtcttggctttgttcttttacatcttcacaactaaaggaaagagatacaatcaaaatgatagtccacttaaatgataaacaagagaatttaaagagacataacccagttactcacccatgaagtgacaatctgttagcagtttaggagatttgcattggtagatagatataatttgggatttctccttgaacattagcttaattcatgggaatctgtaattatagctttcttgaaagggtatttagctcagtgtacaaaacataccaatttttgtgaatcaggcttacaattttctaaccaagctttcaaaacaagattagaaatgagggcataaattattatcgatgcacaaaattgtcactctttatttggcttggaagggttttgaaatgcccagagaaggccctgacaaatggagaagatggaatatgtccccttcagttggattcttgctccgaagtattccttgagcctatactccaaagtgtggcattataactggtgcagacggagtctgtcttaaaactgaaaaggaggatccagagactggtacaaatgtcccacctcctttttttcttacttcgttattgtcaaataattgtaatgatgggacaagctaaatcatgagtcttttaaagtctcttcgatttgctttacacctggggggttgttgcttgtctctgctaattttagccatttcacaggcccatgggagcaattctacctaatgacagtgaatccaacagaagttcataactcactgatcacttagtttctctgcactcctcaccttataactgcagtcttgtggcatttttccaaaagagagccactgtgaatcaagcatagagttttatggcctgaatccaggttagattatttttttcaagaaaaagaaaaaaaaatctaacagttaccaagaagcagtcaggctttacaaatatcaccactttaaccatgaggccatattaggaaggcttttgactggcattcaggtttgggggagtctgaattttctatgccatggtctcagatttctgccccatatacctaggcactaatttagttcatatgtactatgtgtacctgaaaagttgtgtggcaatcaaattttcacaaatagaatcctgttttaaatacactaagaaagtacctactttatcctttaaacaagaggtcagcagactttttctacaaagggtcagatagtaaagattttacaccttttgtacaatacaatctctatctcatctacttagctctgccattgttgcataaaagcagctgtagatgatacacaaatgggtgaggctgtattccaatgaaacgttatttgcaaaaacaggtggtagattaaatttggtcccaaggcttacttgggaaaaaaaaagatcttttgaaaaagaaaaaataaatgaataattttttaaaaaattgttccctaggtcatagtttgccagcccctgccctaaacaaataattcttgaatgcctactgtggtgtgtaagatatgagtaaataccagggatacacagagaacaaaagagaaaaactgctattcttgtgaaacttggaagttggaggtaagctatttaaaataaacccacaataaagtacttcacatagtgcagactgtttctttaaatcaaaactcactccaaacaaccaattgattcactttgtaagtttgaatttttgtcttcagattcttttaaagtgggcccttagtcaggagcggtggctcatgcctgtagtcctagcactttgggaggctgaggcaggcagatcacttgaggtcaggagttcgagacaagcctggccaacatggcgaaaccccgtctccactgaaaacacaaaaattaggctggcatagtggcatttgcctgtagtcctagctactcaggaggctgaggcaggagaattgcttgaacctgggaggtgaaaattgcagtgagccgagatcatgctattgtactccagcctgggcaacaaagcaagactctgtctcaaaaaaataaaaattaaaaaaataaagtagcctctagcctaagatagcttgagcctaggtgtgaatctactgccttactctgatgtaagcacagtaagtgtgggggctgcagggannnnnnnnnnnnnnnnnnnnnnnnnnnnnnnnnnnnnnnnnnnnnnnnnnnnnnnnnnnnnnnnnnnnnnnnnnnnnnnnnnnnnnnnnnnnnnnnnnnnnnnnnnnnnnnnnnnnnnnnnnnnnnnnnnnnnnnnnnnnnnnnnnnnnnnnnnnnnnnnnnnnnnnnnnnnnnnnnnnnnnnnnnnnnnnnnnnnnnnnnnnnnnnnnnnnnnnnnnnnnnnnnnnnnnnnnnnnnnnnnnnnnnnnnnnnnnnnnnnnnnnnnnnnnnnnnnnnnnnnnnnnnnnnnnnnnnnnnnnnnnnnnnnnnnnnnnnnnnnnnnnnnnnnnnnnnnnnnnnnnnnnnnnnnnnnnnnnnnnnnnnnnnnnnnnnnnnnnnnnnnnnnnnnnnnnnnnnnnnnnnnnnnnnnnnnnnnnnnnnnnnnnnnnnnnnnnnnnnnnnnnnnnnnnnnnnnnnnnnnnnnnnnnnnnnnnnnnnnnnnnnnnnnnnnnnnnnnnnnnnnnnnnnnnnnnnnnnnnnnnnnnnnnnnnnnnnnnnnnnnnnnnnnnnnnnnnnnnnnnnnnnnnnnnnnnnnnnnnnnnnnnnnnnnnnnnnnnncaccatgacagggggcaggggatcaatactatgggtggtttataagacctcagtattctcaagaaggaatgcatttcactcccaagtgtagatcttaaatgttgaatgattactctgctcttacaaaaagaatgctcatgtagatgctatgactgtacttgtaggaaaatgtccaaagtaattttaccttgtcaggagatcaaactggattcattttgtttgactttttaagaaatcctgaaagcataactttcaggataaggtaatgtacagaagagaagcaatagctttgtcttcagtgaccagtgctatatcctcagcacctaaatcagtggctagaatatagtagacatccaataacttttgaaagtgttttcaaaatactttagttttgagagatttatgtgagattttaagtaaataactgactagagaaagatctaaatgagtttactcattgaaatacactgaattgcctccacaccaacaaattggccatatgtaataattctttttgggatctaaaaaacttagtaccgagaagccaaccctgcccatacataaacacattgtaattataacaaaactaggcagaagcttctaacagcagcaggaggcatgtgggaatttagaccatcaacttgctcctgcaaattaagccctttctctttaagagttaaaaactatttggctatagacaatatcaaacacatcagcctaatgactcagcttatgcattttgagtcatgtaattacgaaggatggaaatccctagaattttctcattaagggaattgtcagagagtttgacattttttacagtatatgactcactttatgggggatgattattattctatgctaaactttgccttggatttccacaaagactgatgggaggcaggaaacataaatcttactctctttcatgtcatctatactcactagttcaccctggtgatcatactatttttaaaatatataagaatgctagttgaaagctgggttttcactccaactttttaagtttcagattttttagaagatgtataattaccctattcacatgattacgtcaaaatacttcccagtttggggtataggaattcacattcagttgctgcttgttgaaagttgtcaattttctgatcatcacaaggatgatcaagagaagaaagggatactttttaaaaatccaaatcatttacactattaatcaactaactccattcagtaggaagaagacttctagatgacactggcttgcctatgatacatattccacacaatttaaatttttatggataaatatgtctagatacctatttaaatatgaataatattaattattgagcatttaaagaataatagattaactcattattcaaaagctctatgtaatttcaaaaccatggtaattataacaccgtcaattgacataaactttttaaagagaagctcaaatgtttcatgtatattttcagaattagaattcttattttaccttttcattacttatttctcagaaaatattatactcatagctaatccctattaaatccttactgtgttctaagctacctctttgtaaatatccattcagtgattgctcatagcacgagtttacatattagaacacatgtcttagagaagttgcctacctgacagaggaccacaggtagagtatccagaatttaaacgcacatctgtccagctctaacaccacaggtcttaaccactgtgtacattaactactcttagccaagaatttttcagctcacgtcatgtagaatattctttttgtaaaatgccatcacattttataagtcattgaagggaatttttcttggttacaaagcaactctgccccataatatctactgaaaagccagtgagctgcttcctaaaacacagccattttaggtgcaggaaacagtgtataaatggctcattgtatattgtatgctttgccagactgagtggcagtgggagtcctttgttatgtgggtgctgacatctgctagagtgtgctgtctctattgaagaatcgtgaagacaaagccgacccacaggatgtctgaatccaaataataatacatgttctgtgtatagaattggtggaagagaaaatgtcaggacagtgtgaggactgccatgtaaggtcagaaccactgcatttagaaagctaccactgcacagggaagaaatctaagtctacaaaattagtgggctgtctctcattatttcgtgctgtcatcagaaggagggccataccctgctgaaactacataaagagcttttgctggtggcagaactgtgaactggatggattctgggaatggccagaaaaacaaatgcctgtggttgtgagcagtgcccacacccatggtctagctagggctgtttgagatttgttgctttgactgaaccaacctgtcattcaactggttggtccattcacagtcagctttattaactttcccattttccctactgagttatttaagtaaagaaagtgctattcggacagcccttggtctctgggacaatcaactgggatttgattttagtatattctgtctccagtgtaaagccttggaagcatctaatttctagtactgatgaaccaaaaatacatggaagcagtcctaggctcacacttgagcactctgagaatggctttgcttactccagattttctcaggtcccagtgggtgtatattttctgacatatttattccagcctcactttcctatcatgtaaaacatacatacaaaatgtagatttcattatagggtctacaaaacagcttaagaaaccaaatactatgtgtgacagatcacactttccaaaagtaatagcaaaaaaaaaaaaaaatctggttccccactttcttccagcatcctgctagaatctatcagatactgcgtctatagaagaatctataagaacagaagcagtatgtacaacattcacaggaagtttcaccaaatcggagtcctgccagatctaattttttttccctaatcacgtttgtctcagtcagtagcttaagacaatggaaataatcagtgccacttttaattgggatgcctttttaggcaagggaaagtgacctcttaaaaaagcaaaattctgactgcaagatagctatcattgtccttcatttaagacaaaaaaaatactagggagggaataaattatgatttgtaataaagtgaaaagtgagattaggtagcatggggataatggaaataaagtgtctcttctttgaaataatatgaacaatcaatgtaacaaatgtagcagaaaaaactccagtttaaatacggaaaagaatgtgttcaatgcctctggttctttaactcagaaatatttggaggttacttactcattatgatggattttttttttctattggaaaactctgttagcattgagcgtttttgttttttgttttttgttggttggttggttttgaagcatttttcttgtctttgcccttgggcttttcttccttgaatactacataatccattactatttcatgtctgccacagagtctgctattttattaaggtcatgccatatttcaaaaggatgcatttatttgtttcattaacagctgcatgtttgttcctccccaggagacttggaagatgcagaactggatgactactcattctcatgctatagccagttggaagtgaatggatcgcagcactcactgacctgtgcttttgaggacccagatgtcaacaccaccaatctggaatttgaaatatggtgagggatggtggttttaatggttgcttagacatcctctgtctctcttttcatatgctctttttagtagccacaaaagaaagaatatgtggcctaattaacaaatgttaacatctaaggaattcccaaaggcctcctgaaactccttgtccttcaccaaaaacactcatacaaagctcctctcacggttcagctttcagaccctgagactcagtcaaatgatgctctggatcttggggatcccacatccctcccaacttcatatcagaatttaaatcctgcgtctcctacaacacttctcaccaaaaatctgtttgcccaacacgagacaatccagtgtcttcaagttgcatctgagagttaaactgccttgtttccaatcccaataccagtgcttactagttttttgacctagagaaagttatgtaatgtatctatgcctcagtttcctcacctgtaaaatgagataacctgcctcacaggaaggctgtgatggttaaataatttcatcatataaatcattccaaatagtcggccagtgaataacgagtaatggggaagcaacattaaattataattctgtgaatattgacctaacttctaccatcttgacacaatttgacttcagatgatcctctcaatgtaaattttccaaaaatccacaggaataagttggcattttgtttcacaaggtctcacagaaaagacaaaggaaaagagtcttggtttgaaagtttactaaaggtctcagggaactttatcttctccttctccttcatccataagtcatctcttgttgccaagggttactatctctggtgatttgagaaactactctagcttgaaattctgacctgaggctatctccaaattcatatccgaatgacctactttttagttagtgtcctagtgagcaaagtaaatcaagatccaccagtagtaatagaaggcttcctacattccatagacactgagacaattctccacagtctatagtccaaacaagccctgaattccagtttttgtcaatttatgggagcttcctgcatctatttatggagtgctttctgctgcagtccttagataaacatgctgttggacttgagtagtgtactgtgttctctgtctgcctctgttcacttccctaacacattttccaggaataaaatatgtcaaaagaacctgaaccagttcgatgtccacaatctaggctggaaatggattgcactaaaacagccataacaactcattcaaacaaggcactcattttcatgggcaaatcactctcccacacggaggtttgactttggcttctttaaccagctggctggtgggctgagtgttcatcctggtttctcttggccaagctgaggttgacctttctgttcactttcattcacaccatatttgaccacttccttgcccactcaaacatacttaccctttaacatatctcttgacttttcctgtcatattgtaatctgtccagagcctcctctatttgggttttccaattggattcagatatttcagttggaaagggactgccttaagaaagaaacgttttcagtggaaaatatatgtatgagctctttaatagatgaactcctggagttcagagcccttaaaaggatgcccagtttcacaagacagccatacggtcatccttgattgtccattgctcattaatttcattctcaaaatcatgggaatgagctgagaataccattttagatcctccttaaattcccaacagtaccagaaacttgctacaggttggggcctgtaattggatatttcacacatactttccttacaaatatattctatactcaagaattgaactaaaagttattgtcctagtttctccacatcccatgtttacctaaaattcagaaatgggaccccgctcccagtctccccttctatatttatttatcaaatcgtgacaacattaccatcttcagatctttccacctgatgtttgtcctaagcttattccctggtatctgtctagcttacccaaaaattcggtttttatttttatcctgttccaagttgggaaagcctatctaccccaacaaggaacacaactccctagtaactttgagacacacacacacatacacacctactctttaaagcctaaacagtcgcacactctaaaagatagcagttaacaaaagtaacgatttgggagaacagttttaaggaatgtccccaaaataatcaatacatttagccagttaattaacttaacatttcttcaccaatctctagttttcatgactgtaggagcttaaccagtcactctcagaccacaataaaccaaaggtgaaagattctgtaacgaaagctagggcactctcccctgcatttaacctcctggccagctcactcgaagccagacaaacaggttcctctttttgtgcagagtccaggaaccattctcgaaaggactcatttgagcacatgcagagaagagtgtacacacatccagttcaccaagggaagccaacacacattgtgggttgtaggtagtaaaaggccttcctagaacacactccttaggatttaaacaaaattacatcggttaatggaaagaattctttcatatacgcaaacttacccagaggaacttttcttctgcccagatcttcacttccaatttgacccagttatacctctttagagctatttggctgagcttaaagagcacataggaaaaacaaattggtaactgtgtttatcacagaagaggaaaattaaatttagggttgggaaaggaaaataaccctatgatattacttttattctacctttacaatgagaatatatacctttgttacttctttaatttttacattatttacttatttttctttgctttcttgtttgattacaatgcattttaggggtaaaatttacgtgtggtaaaatgcacaaaaattaagtgaatttggagaaatgtctatgacctgtagccattccaatggtaaagatatagaacttatttttcccctagaaggatgcttcatgttcctttccagtcaatcttcataccccaggagcaatcataattctcaattctattaccctttggtttttgccagtttctgatagttcttattaatagaatactctttattcttttctgtcttctttcatttaaccagtgtttgtgagagttagccatgttgatgtccatctcatagctcatcttttcaattgctaagtagtaattccactgtatgaatataccacaaatttttaattctttctcttcttgatgaacatttgtgttttttcaagtttgagactattattttttaggttgctgttcacattcttggacaaatcagtttgtgtatatatattttcatttttctggggtataaaacctcagaatggaattgctgtgtcataaggtaagcatgtatctaagtttataagaaaccgcccaacagtttttcaaagtggttataccattctactctctttccagcgatgcatgagagatatacatcatttgcaacgtttgactttgggatagtatctcgttaggtttttaattcgcatttgtcaaataacaaatgttgagcagcttttcatatacttggtcttttgcctgtcttctttgggctagtatctgttaaaagcactgagttatttgtccttttgttattgctggatatgagttctttatacattctgtatacatttcctttgtcagatagatgtattgcatctattttctattctgaagtttgccattttattttcttactggtgcgttttaataagcaagagtttttttttattttgatggagtctaatatatcatttattttcttttatatgtagtgctttttgtatccttgctaagataactttgcctactcccaaagttgggaagatattttctcatgttttcttttaaatgttctacagttttagcctttatatttagtttttttaattattattatactttaagttctagggtacatgtgcacaacgtgtaggtttgttacatatgtatacatgtgccatgttggtgtgctgcactgattaactcgtcatttacattaggtatatctcctaatgctatccctccccgctccttccacctatgacaggccctggtgtgtgatgttccccttcctgtgtccaagtgctcttatcgttcaattcccatctatgagtgagaacatgcagtgtttgattttttgtccttgtgatagtttgctgagaatgatggtttccagcttcatccatgtccctataaaggacatgaactcatccttttttatggctgcatagtattccatggtgtatatgtgccacattttcttaatccagtctatcattgatggacatttggcttggttccaagtctttgctattgtgaatagtgctgcaataatcgtacatgtgcatgtgtctttatagcagcatgatttatactcctttgggtatatacccagtaatgggatggctgggtcaaatagtatttctagctctggatccttgaggactcgccacactgtcttccacaatggttgaactagtttacagtcccaccaacagtgtaaaagtgttcctatttctccacattccctccagcaccttttgtttcctgactttttaatgatcaccattctaactggtgtgagatggtatgtcattgtggttttgatttgcatttctctgatggccattgatggctaatatccagaatctacaatgaactcaaacaaatttacaagaaaaaaacaaacaaccccatcaaaaagtgggcaaaggatatgaacagacacttctcaaaagaagacatttatgcagccaaaagacacatgaaaaaatgctcatcatcaatggccatcagagaaacgcaaatcaaattgcgtttatttgtttctcttgtcttatgcattggctaaaacctcctgtacaccactgaatagaaatggtgaaagtggatattcctgtcgtgtcctggtcttagggaaacaattcatgttcacaatttcagcattaaatatgatattaactataggcttttgtaaatgctctttatcagattgaggaagtgtctttctatttcttatttgctgtgagtttttgacatgaatagatgcattcatgttattaaattatgctttgaatgcatcgattgattataaccaggttatttatgtcttctagtctgttaacatggcaaattatattgattaatttttgaatctttaacctgctttggtttcctgagatgtgccctactttataattatgtattaaaattagtgtgttagtattttcttgtgaaagtttgcttatacatttttgagggatatttgtctatcaacttcttttctctaatattttggccaggtttgggtaccaggattaagctagcttcaaaaaataggttgagaagggtcattcctcttccagtttctaaaataatttgtgtcagattgacactatttctttccttatacatttgatagaatttaccagaatataaccatcaggcatagagttttctttggggggaagtttattgataataagtttaatttctttgagagaaatataactattgaaatattccatttctatgtgggtcagatttactaatttgtgtttataaaaacattttcattacatctaagttattatatacattaaaatagcatttaaaatttccttattatacttttaacatctgcatgttctatagtgatatctcctcttacattccagatattagtaatttatatattttgttttcttaaccactcttgttagggttcaccagccaaaattacctatgaaaatccgttacgttacccatcaagtatatgtgatattatgtatataaccctttatactatgttatcattttctttaacactttttttaatcaatattttttacagctcttatttcttacatatattcctatggaacatcaaaaaaagcaattactttttaatctaaacaaagtatttgtttttcagtgatcaattataaaaatatagaaatttcccataattttataaatatgtcttgactatttcaggttcaattgcatctaattctaagtaaatcatcactaagtatcatagcagcagaaagccataagattttaattcattatctctcattcctgaacatgcctccactcacccacccacatacctatgaacagagttaaagtcaaacatacatcaatgtgcatatgatactattccactgcatacaggaactcctacctgaatcaagacatatcccctttttattcctacagtggggccctcgtggaggtaaagtgcctgaatttcaggaaactacaagagatatatttcatcgagacaaagaaattcttactgattggaaagagcaatatatgtgtgaaggttggagaaaagagtctaacctgcaaaaaaatagacctaaccactataggtaagaagttgtatataaaagtatggttgtcacttttgggctacctgaaaacactgtgtctggacattctgtaggttaaaagtagacaaatagtggaaacaactggcaatagataatagctaattccctactgtaaatttttataataaatgaaaagcttgaaatttatactttcctgcagtgaaagaattctgaggatcttcaaacccaggtgtgaaagatagtgtttgtgcaaacctacatgaagtggctaactggagctgggcttcctgtcatccatcacaggtgtcctttccttccttatctgtcctttccttccttacctgtccttctcccaaattccttgtggtcttctccccaaatccccacaacattctgagtaagtttagctaacttatcaagttattttaaaaagcatatatgccttctctattagtcagagttttctacaaaaaaaagggaatcaataggaggatagatagatagatgattgataggagagatttctattaagaaattgacttttgtggttgtgggaactggcaatcgcaaaaatccataaggcaagccagtaggctagaaattcaggaaagagtgcagtattgagcctaaattccgcagggcaagaaactcaagcagattttctgtattgtactcttgagacagacttgcttcttcttcagggaacctctgtctttgctctagaggccttctactgatgaggtgatgcccaccacatcacggaaggcaatctactttactcaaagtttactgatttaaatgttaaccatgtcttaaaaatacttttagcattccctattcgctcccccttcaaccctcaaaaagaaaattaaaggtaagagagcaatactcattagagataagaaagagtaagaaacctagctcagctttgtctcagttttgtttcattaagatgattaaatagagagttaaagcagaagttccatgtgtgaacaattaacttgtgaaaaggcaaatgtagtagaaaagagacattaggcagatggctgtgcatgttggccacacagaagcagcattggccatgaccagtgtgggtcctggttaggggaagagaactgggtttgacaacaacagggtatctctgaggttataaaaagttgggttctgatcatttggagatgaggtccctatggatagggcaccatatctaaaggttcaccatttacattgcaaatatacattcagttctctgagagtgagcagagaaggcagaggttctcagtcttctgacaaggtcctggagcatcaggggagagcccattcttacaaaactccacaccagcatgcaagcccttacatgcacataagcactcacaacacaccaagagcctccaggtgacatctgccacctccaaatccccatatcccacatgctcaatgcacttgcagtctccatcccccagcagactgcaaatctgacatgcctcatccgaacggcaagggggagaggtacgtatggtacacacactgctgatggcataggcccctttggaaggggtagtgtgagtctcttggggctatggcaagcacccctggacaagcaggaagagaggtggtggaggcatgtctcacggtagcatctccttctaggtcctaatgggacacttcattaatggaactaccatttaagtgagtttaaactggatgcttctgattgagccccagagccagtgctccactgccaccacctgcaccctcacttccccttgtttaagcatcttccaacccagtaaggctgaagagggaagcttcctgccttcccacttctcttagcagagtagattgatatgattattcagattgtacaagaatctattccctctgaagtattgcttgatgaatgagcccctttttctaatttgctcaaagaaatcatttgagcttgaggaaaactgtccagagggcacgaggaccagccgttgtgatatgtaacaaggtagagaaacaaaagctaaatgaagaagagtgagcctcagaatcaaagaactggatttggatccctttaaaccattttacaggggcctgaatgtaattaacttctctgaaattcagtttccttatcaatatgctggtgataagtgactattgtttgaagacagcataagcaaagcatgcagtacttaggagatgtgttcttccttcaattcctctattattaaaagatgggcacagggcaggggcttcagctcagaaggccttgttgagaatagaatggagagcaggaacaagagagaggggcaaaggcattgccagcattctctgttcggctgttctccacccactgcctttcctcctgcttccctctaagtccagggcattttcccttttgataaacttccccttttacaacccatccaagggtgaaaaacaaagtcattacttttttttcagtacctctaaggcaaagcagcagaaacaggcagtcaccactacgaataagtgactacaacaagagctaggccaaactctgccatgtgggctgcattttattgggccggcaagtaactttaaatcccagctcacactctactgagtgaaagtctgatgaacccgcatcttcttgtgaacaactgcgcctgagatcagtcatgcaagaagtagcacccccacccccagacaactaacttcccaggctgtgaccaacaagcagccaagaggccaggacagggaagtctcaggacctttctaggaaatcaatacctttctctgggtttgttctgcctgaaataataccaatctccctccaacagcttagcatgtgtggagcatttgatactaacagcaaccctgcaaggcaggaaggcagtagggagaggcccaagaggaattcagcattaaggcagtgagactgacagaggggaccccctgaggacattctggaaggtcttagccagggccaggatgcagacccttcatgtcactgtagctgagacgaggtgcaaggttcacagcatataacctaattttattacaagaatgaagactcagagtttaaatactcctgctttggggctcattagtaacaagttctccaatattcaaaaggcaaagtggatgtgttttagtgtaaaattaacactagctgctgtaacaaataagcccccaaacatatgatatctcaaacaccgtaggtttatttctcactcacatcagagtcaaaatggatgtttctaacctgcagctggggcttctcccagcagtattcggggcactttccatcttgtggctccaccgtctgtaatgcaggactccaagtggtggaagaggacggagcagaggagtcacacatgggtgtgtgtctggcccagggtggaagtggatgtgcatttcttctgcccacctcactcacaaggccacaccccactgcaagagaggctggagaatgcggactggatttaaacccaagaagaagaaatggttttctgaatagttggccatttactgacacaaaaagggtcaaagtgacttgcagaggagatgaattttaaatactataattatttccttggctgccctttagacagaatttatttctttttcttttccagttaaacctgaggctccttttgacctgagtgtcatctatcgggaaggagccaatgactttgtggtgacatttaatacatcacacttgcaaaagaagtatgtaaaagttttaatgcacgatgtagcttaccgccaggaaaaggatgaaaacaaatggacggtatgtagttcaactacattaataaaataaaaacttatgaatgttttctattttgttggcctagtagtgcatttcccctgggagggcccaacaattttgctttcaaaatctaccttctactgaaagaatctcccaatattggccccatgaaaacctggatcttccctgatgcatactcttctagctctggttgttttcttctgctctaattttggtcttcagaatgtttctacattagtgagttggataacaatatagattgaggccaaattaatcctctgtattcaggggcctcaaaaagtgtcatgtctagtgccactttcataggcaaatcaggcaaaatgtatatctgcttatgatcaccaagtcgtagccacattctggcttatgagattcatgggaccagcatgaggtaaagaaaagaggcataatgtttgcctttgttttgtttttattttaaagcccaaggtctttgtttttgaagtaacagcttaatttttacccttcataatcaggagagttacttagatgctctcttcatgatttgttgaggttggaatgatttggcagtccctgaaatttattttggggaggaggtggcagaagagtggagtgtaccaggttatgagatttctcttaacccaccaacctaacttctgttctttctgcacctcagagatgaagaagagatgatgatttctcttcctcaagtccttcttattcttgctgtcctgttttttcaggccaagattggccttgtttgtttgcagtgtgatgcaagatgccacttgcataaatgtaacaactgccccaaaccacctgctccctccttctactcacccaccccacccttgatcctgccatctttcattatacatctgaaaattgcaccaattgaaaagcaacttagtggagaaaggaaggattatgaataaatgctgccaggacaattagttaactaaaaagaaaaatagataaattcaataaatacatgaatttttttgagatggagtcttgctcagtcatccaggttggagtgcaatggcgccatcttggctcactgcaacctccgcctcccgggttcaagcaattctcccatctcagcctcccaagtacctgtgattacaggcacccgccatcatgcccggctaatttttgtatttttgtagagctggggtttcaccatgttggccaggctggtcttgaactcctcacctcaggtgatctgcccacctcagcctcccaaagtgctgggattacaggcataagccaacacgccagccaaaaattgttttaattaaaaaaaattaaactaaatgcctagccaccttcatataacaacaacaaaataccagatgatttaaggaaattatataaaagtgaaactctaaacaaattagaaaaattatagccaaatgtttacataatcttgacatgaagaagaacattctaagcatcaaagctgtagaagaaaagaaaggattgagacatgcaactacataaaaagtggaggtttatatatgtcaacacacacaataatcaaaaatcaaaaatgcaaatttaaaagtaagcttaaattgccacataaacagctgatagatggttagtatcattaatagataaaggactcttataaatcattaaaaaaacaaatatcacaatagaaaaatgagcaaaaaaattgggaaaaatctcataaagtatggaatagataaattcaataaatatatgaaaatgaactaattatcaaataaatacagatataaatagcaatggacttctttttatctgtcaaattgatagagtggtttttttttaatcttaaagataatacgctgtgtggtggagacttttgtctctttatcactattcacaatgtaaaatggcgtctttctggagagaaatgattcctgctcactaacctaacctaacctttcatctccccttaatatgtgaaaggatagagagaaaagaagaagatattgaagtgtggaaagggagatcctgggcagtgcctaactcacctgaataagacccatcatttcactctcctccttgaccactcacaacatcctttataagctcagattctgtccctaattttgctgttgactcctttacgtatcagagctccttattctaacaaatacgagacaacttcagagaatgcttatgggactaaaggaatcccaattgaaatgatttgggagatttaggcaacacctcttttcccatcctaagaatgtaactgcactctactctctagcatgtgaatttatccagcacaaagctgacactcctgcagagaaagctccaaccggcagcaatgtatgagattaaagttcggatccattccctgatcactattttaaaggcttctggagtgaatggagtccaagttattacttcagaactccagagatcaataatagctcaggtaaggaatggtggtagagtttttgttccctcagagtgctttgcatgtcaaagtgtgggagcaagtgagaggaagattgttgaaactaacctgcaaaataggacacccttggagggcactcttacactttctttggagaatgacttgcctgctgtctttgcgccttttgtgaagaacaaggaagcagagggagtggggtccttattagctgagaattagtacaagccatctgtattcctggaagctgccatacattttgaacaaaatccccacccactacgtccagttaaccaatttagcctgggaccccaatggctgctgtctctaaggcccctttaagaagcacctttattggtgtcaggtatgcaggcaagtgcggctgtcctatgtctccttttccagaaggatgaagatgtctttgggactggaactgagaatgtgtaggaactgagacatctcctccctaaaatttgcaacaggggtgaacatccctctcatcatctcctgctctggcttcttttccttggtagaaagtcaagaagggaagagagcattggtacctttgatgctagatcacgtttacatttcaagtggcagatgctctgggcctggtcacccaagtcaatgccttttaaaccaaaatccctccataaagctgtcaaatatgtctcttaactgaaaagcaactttcaggaaataataagtgggcccacattactaagtaaatgcaaagcaccctgagaccctacccccactgcatggctactgaatgctcaccacaatctattcttgctttccaggggagatggatcctatcttactaaccatcagcattttgagttttttctctgtcgctctgttggtcatcttggcctgtgtgttatggaaaaaaaggtgaccttcttcaactaataaagagggtgattgtgtgggatcacggacagtcagagcttaagccccatttattgatgagaaaaccacaaaggggattaaggcatttcacgaatttagtgcccagtatccctatctatcctcagcgaatttccacagttaatttcataagaggcaaaaagatattaactggacattaggcaaacgctgtccccaaagtaagaattccgtaatgcaatgtttcccaagcttttcttccagtatctcctaaaggttgcagaagccatcattcatggcaaatgcacaatgtacttgaagtcttgactttaagcatataaattcatgggattttttatactaatccatgctaaggctatgtttgtttcatcataaaaatgatgttttaaacatgcacttgttaaattacttactattctaggagaatgcccttggcagaaggctacatatccccaggattacaaataccctaatttgaaaagtactgcctggaaagtactaagcaatttccctgggtaatttgaaaatattcccccacttccaccaaaattagctgccagagttgctgtcagtaaagagaggaaataaaaagacaacacttaaattgggagtaaacaacggggttaaatttacttccatagctgcaccaaaattacctccttgcaagccttggtgttccttccctctagggctttttcccagaggtatattattgtcatgtcttgttcacagaatggattgatatctgtggtctctggtccaacccctccttgaattgatagggccccgaggcccagagaaagccagtctcttgaccatggtcacccacctaattgtgttagagccaagactagaaatctgttcttctgattccaagctcagaataagtgggaagactcagtgtgcctgtgccctctgccattcacttcatctatcaatgttctctgatttcaggattaagcctatcgtatggcccagtctccccgatcataagaagactctggaacatctttgtaagaaaccaagaaaagtgagtgtttttggtgcttaaaaagtgttgtgttggcaacatcccagtggccaagaatgatattccaggacaaggaacagttgaacctcaccttttggtatttgattcatcctgtaactagggtccctcctaagaccctagctgcagtagggaactgaaataagatacacatctcagaacttctgggctccctggggctggagggcacagccagtggtcacttcaagtcttgaagtgtctcagaagctccagaagcaaagagtccattgaggaacatgctggcaattctgtgacattccctgtcagaaaactctatagacctactcctgaactgaacatttgatggtgtgtctctctggtgccatcttaataccctttctcctttttctgtgcagaatttaaatgtgagtttcaatcctgaaagtttcctggactgccagattcatagggtggatgacattcaagctagagatgaagtggaaggttttctgcaagatacgtttcctcagcaactagaagaatctgagaagcagaggcttggaggggatgtgcagagccccaactgcccatctgaggatgtagtcatcactccagaaagctttggaagagattcatccctcacatgcctggctgggaatgtcagtgcatgtgacgcccctattctctcctcttccaggtccctagactgcagggagagtggcaagaatgggcctcatgtgtaccaggacctcctgcttagccttgggactacaaacagcacgctgccccctccattttctctccaatctggaatcctgacattgaacccagttgctcagggtcagcccattcttacttccctgggatcaaatcaagaagaagcatatgtcaccatgtccagcttctaccaaaaccagtgaagtgtaagaaacccagactgaacttaccgtgagcgacaaagatgatttaaaagggaagtctagagttcctagtctccctcacagcacagagaagacaaaattagcaaaaccccactacacagtctgcaagattctgaaacattgctttgaccactcttcctgagttcagtggcactcaacatgagtcaagagcatcctgcttctaccatgtggatttggtcacaaggtttaaggtgacccaatgattcagctatttaaaaaaaaaagaggaaagaatgaaagagtaaaggaaatgattgaggagtgaggaaggcaggaagagagcatgagaggaaagaaagaaaggaaaataaaaaatgatagttgccattattaggatttaatatatatccagtgctttgcaagtgctctgcgcaccttgtctcactccatcctgacaataatcctgggaggtgtgtgcaattactacgactactctcttttttatagatcattaaattcagaactaaggagttaagtaacttgtccaagttgttcacacagtgaagggaggggccaagatatgatggctgggagtctaattgcagttccctgagccatgtgcctttctcttcactgaggactgccccattcttgagtgccaaacgtcactagtaacagggtgtgcctagataatttatgatccaaactgagtcagtttggaaagtgaaagggaaacttacatataatccctccgggacaatgagcaaaaactaggactgtccccagacaaatgtgaacatacatatcatcacttaaattaaaatggctatgagaaagaaagagggggagaaacagtcttgcgggtgtgaagtcccatgaccagccatgtcaaaagaaggtaaagaagtcaagaaaaagccatgaagcccatttggtttcatttttctgaaaataggctcaagagggaataaattagaaactcacaatttctcttgtttgttaccaagacagtgattctcttgctgctaccacccaactgcatccgtccatgatctcagaggaaactgtcgctgaccctggacatgggtacgtttgacgagtgagaggaggcatgacccctcccatgtgtatagacactaccccaacctaaattcatccctaaattgtcccaagttctccagcaatagaggctgccacaaacttcagggagaaagagttacaagtacatgcaatgagtgaactgactgtggctacaatcttgaagatatacggaagagacgtattattaatgcttgacatatatcatcttgcctttcttggtctagactgacttctaatgactaactcaaagtcaaggcaactgagtaatgtcagctcagcaaagtgcagcaaacccatctcccacaggcctccaaaccctggctgttcacagaaccacaaagggcagatgctgcacagaaaactagagaaggggtcataggttcatggttttgtttgagatttgttgctactgtttttctgttttgaattttcttctttgttctgtttttactttatttagggggactaggtgtttctgatattttagttttcttgtttgttttgttttgtgttgtctgtgaatggggttttaactgtggatgaatggaccttatctgttggcttaaaggactggtaaaatcagaccatcttattcttcaggtgaatgttttactttccaaagtgctctcctctgcaccagcagtaataaatacaatgccataatcccttaggtttgcctagtgcttttgcaattttcaaagcacttccataagcattccttccacctccttgataggcatttatggaaagcctgctacatgtcaatcatactgttaggcacaggggacctaaagacacataaaaggatggcattctgcctcataaattgcaaaacctaatgaaagtgactgcttggtaaacaaattattattatattataaaatgctataaaagagccatattgaaagtgccctgttggagacagggcaaatgccacaaaaatgatgtaaatttacatggaggaaaagtagaatctgcctggtttgtaggcagcagaagacatttttcatcagtgggcaggtgttctttaccttttgtagaaatgggagtcaagtctcaaataggaggctccacaaaatctcatgccaggtctctgataccttattcacagaagttctttgaagtatttattgttattttctttgacttatgggaaaactgggacacaggaagacaggtaaattacccaacctcacacgttaagtcagaactgggagccataattttgtatccctggtataaatagacaatctctcgaagaaatgaagagatgaccatagaaaaacatcgagatatctccagctctaaaatcctttgtttcaatgttgtttggcatatgttatctttggaatttagtgtctgagcctctgtctgttactgtagtatttaaaatgcatgtattataatcatataatcataactgctgttaattcttgattatatacctagggacaatgtgtaatgtaagattactaattggttctgcccaatctcctttcagattttattaggaaaaaaaaataaacctcctgatcggagacaatgtattaatcagaagtgtaaactgccagttctatatagcatgaaatgaaaagacagctaatttggtccaacaaacatgactgggtctagggcacccaggctgattcagctgatttcctaccagcctttgcctcttccttcaatgtggtttccatgggaatttgcttcagaaaagccaagtatgggctgttcagaggtgcacacctgcattttcttagctcttctagaggggctaagagacttggtacgggccaggaagaatatgtggcagagctcctggaaatgatgcagattaggtggcatttttgtcagctctgtggtttattgttgggactattctttaaaatatccattgttcactacagtgaagatctctgatttaaccgtgtgctatccacatgcattacaaacatttcgcagagctgcttagtatataagcgtacaatgtatgtaataaccatctcatatttaattaaatggtatagaagaacactttgtggcatgcctgtcttctctggaaactgtggttagacggattcccagaatggaccacacatctcttcagctcctgaaaactcacctccccatgagtccatggaaaaaattgtcttccacaaaaccagtccctggtcccaaaaagtttgagaaccactgcactagaagacagcctactagtggttaagtctcaatgtgtcaatgtatttaacagagagaacagagagtgttgcttcactcaacaggtggttcagtggaagccctgcatggacacctatttcacttgatatacctagtccctgcagtctgcagagtagtggctggaaattaggcttggcagaattggtgggggccaatgattaagcatttggcatgccagcctaagaagttgtcatctattttgcagaaaatagaggggcttggcaggattttaatcaggaatgtgatgtgaaatatatattttctgtgcatgtgtgtatcaggttttaggaaggaatcttaattcagtaggatataaatataaaataattctgacatttctttaattacttatctccaaagatgctccactgaaaatccctttctgaagtagattcctttaagtgaccaaagcttaattcatctagttttaagatgcagtcttatattctaactaaagccacacacaccctatcataaccttgtggtgaggggaacttggaaagaaaggaagataatagcttctgttctcttgactcctcccccttcttggcctcttcctcctctcttcttcctcctctttccctttcccctcccccttcctactttttcttgttcttgttcttcctcttcttccttctttctttttctaacagcttaaaacaccacacatttcctatctcacaacctctgcgggtcagaagtctgggcatggcttagctgagtcctcagcaaggctgcaatcaaaatgttggcccaggcttgcttctcttccagaggctccattggcaatgggtccgtttccaaacttacttaggttatagtagaatttattttcttgtgcttgtaaaactgagtgctccagcttcctgatagctctcactctcggctcctaaagttcacccacagcctcttgtcatatgaccctcttcataagcttttgtgttttttttgtttgtttgtttgtttgttttgacagagtcttgctctgttgcccaggctgctggaatgcagtggcaccatctcagctcactgcaacctctgccttccaggttcaggagatgccctgcctcagtctcccaagtacctggaattacaggtgcacaccaccatgcccagctaatttttgtattttttgtaatggagatggggtttcgccatgttggccaggctggtctcaaactcctgacctcaggtgatccacccgccttggcctcccaaagtgcggggattacaggcgtgagccaccgtgcctggcccataagctctctttcaacaaaagcttgcttcttcaaagccagcaagggagagtgagtctaccagcaaaatggtgtcttatatatgtgatatgaccacaggcgtgacattccatcatcttgccatattcttttggttagaagcaagtcagaagtcccatccatactcaagaggaggggattatataaagacaagattttcaggagttggcgatcgcaggggccacattaaagcctgtttgacacacaagctaactcagtcatgccgtttttagttcagtctcttattaaatctttagtcaaattcagatttcttctcctcccattctcctgagagttttagatacacggtgctatgaattgagttgtgtccccccaaaattcatatgttgaattcttaacatgcaatagctcagaatgtgactttatttggagatagtttctttaaataggtaatcaatttaaaatgtcattagggtgcagcataatccagtatgactggtgttcttataaaaaaaaaaaggaaaatttagagacagacatgcacatagggaaaacatcatgtgaaaaatgaaggcagagatcaggggtgatatttttaaaagataataagtatcaaagattgatagaaaatcatcagtagctaagaaagaggcatgggacagattctcccccacagctctcaaaaggaatcaaccctgctggcaccttgatctcaaacttctaggctccagaacggtgagacaataaatctcttgtttaagccactcagtctgtggtgctttgctatgacagccctagaaaatgaatgcacatggtactgggagaaggaatctggggccatgtgacttctttggactcccctgagctctagccttcctgtcttgtctgtggatggtatcccgtgttgtgtctactgctaatgtgtcagggcccatcatgttcctttgaatgtggatgatccacatcctgtctattaactgggtctctatgtgttgtccaggaagcttctttcagcctctagacttctctgcctcttcaagcatgggaagtagttggatcaaatttcctctttagaatgatccccctggtgaaggaagagaataggtcatatgacagctagactagagccgggacagatggacttttgtgacctctatgcccgcttaggggatgccacatcaggtccaaggtgagcctgaggctaaggccaagttggtctttgtgccacctttatctccttgtcagaaaagctcttccttcttttctgccacccttccatctaccagtacttactagttactaaatatctgaatatctgtttcattccaacaagaacatagatagtagaacttgtggggctccagggaaatccctaggccctggaaagagaagcttgcagttaatagctttctgggtgtcttcttactgattggctgagagttagataagctagagcttgagtgaagggcttttatccttttcctccacctccacaacatcttataatatggaatcagccagcctgcctgtcccaaggcctttgctcttgccgctctctccatctgaaacgtggtttctctggatctttgtgtggctggctccttcttattatccaggtcctagcttctacgtaacctccacagaagtggtcattctaatgaaaacaagaccctcctcctgatagtctctatcatgcctccctgtttatttcctccaaaactccttcctcaatattaactaccaattattaatcactaattcattactaattattaataatttatttttgatgattgttcttattgcctctctctgattctaaaattcaagttccatgcaagttccacttcctatattattcttggaataaaacaaatatttagtaagtactggtagatggaagggaggaagaaaaggaagagctattctgacagagaaagatggcacaaagaaccacttggtcttagtctcagactcacctttgacctggttgtggtgtcccctaagtgggtacagcagtcacaaaagtccatctgaccctgccctagtctggctgtcatatgacctatcccccacccccactgggagtatctttctaaagaggaaatctgatcaagctacctccctaactaaaatcccttagtggctttccagcatggcacgtgacatagcttggattcttgtccccatccaaatctcatgataaaatgtaatccccagtattggaggtggaccctggtgagagcaccatccccttggtgctgtcctctcaagagtgagtgagatctcacaagacctggttgttttaaaagtgtgtggcacctcctcccacccttgctcctgctttcaccatgtgatgtgcctgctccccctttgcattccaccatgattgtaagtttcctgaggcctcctcagaagccaagcagatcttagcaccatgcttcctgtaagccctgcagaaccatgatccaactaagcctcttttctttataaattatccagtcccaggcatttatttatagtaatgcaagaacgaactaacacagcatggaaggctcttgatgatctagtgtattactttcttgtggctactgtaataaattatcacaaacttagtggcttaaaacaatacaaattcatttattctcctgcagatcaggcatcagaagtccaaaatcagtcttctggggcaaaaatccaggtgtcaacagggctgtgatacttctgaagactgcagggagaatccgttttccagcttttttcatccaccagaggccacctgtattccctatcccacaaccctagccccttcctctatctttgaagtggactatttcatcccctgtttctatcatgacagtgccttctctcatattgaccctcttgccttataagattccttgtgattacactgggtccacctgcataatcaaggctaatctctccatctggagatcttaatataatcacatctacaaagtccctttggccattgaagtaacatatttatatgttttcattattaggatgtgggacactttgtcagggacagggatttttcagcctaccttttttcttcaccttttgccaccactctcagcctgtggtctcaattgccagcctttacacttgctacccccattgtctgggtagttcataccagtccctcaagactagcctcaggcattgcctcttctgggaatacatcctcttacaggccaggatatgactcatgggtgcattcctaatagcacttcacttatttctactgtcaccacactgatctgtaattacttgatttgtctgactcttctgggggcttgtaagcattctggcacagagaactatgacttactggggcttacatctcttgctaaacacagtacctaaaatttagtaggcattccctcataaacatgaatgaatgaatcaaagaatgaataaacatttaggaaatgatgttgtgttggtcaacttctttcctcatcactgttaaagataaaagaatgccaagccaggttgttcagacagaagcaagcaccacatccctgagagagcagcacatctgggcagccatgtgtgagaagtcggttgcattccccatacacagttgtctttgcagctgtactcttaaccactgtaaccacagaagtggggaaacaatagggtggggtgaagtgaaaagaaaattttccaaaacttcatttatctaataaatacagatatttaattgtgttttttcagttatttaattttagattcatatgaaattctaccctaatttctgaattttaatggcttgtggcatttgtgtgggcatttgtgtgtagcttgcaatgacacagctgttcagacaaagaaagtgtgatgcacaaaacctatgaggtccaaggaacacattcatgctcctcaagactcaggtaaaagtagtgaagcaaacaatatgcaaagcccctgaggattgaaaaataaggcttacatactgaattgtgctgaaacacttgagttcatctggagggcctctcaatggtaaattgttagaaccaatttgcctttaccctaagtaaagatttttcatcaagaagaggtggaaaacttacagagactgaaaaggaccctctttttatgataaattagttcctgcaaagtatgaactgcactagtcatgacacaaaaactatgcagaataatcagaaaacattttattattaagcttatccactgatagactgaaatattacttttagagcctaagaaagcattaatttaattagagcttcagtaaatgctatagtgtcagactgataaacctgtttgctacataattataaactttcatgaatttcacagtgtgaagttcaagtgtgaagttgccagtgtagaactgaatgatgcttaaagctttattttctcaaataaaaaattttaataaaataagagcagataagctagggtcatgctcagtggtgaaattttaaaagtactccattatattgaaggataagacaaaagaaattctattgtcacttcatttaacatggttctagaaattctaagaaattcaattaaacaagaaaacacagtaaaaagcataaatattgaataggagaaaattaaatcgtcattattggcagataaaattattgtatatatggaaaacacaagagaatcaagtagaaaacacactacaagacacagatactttattaaggtctccgcttacaatattctcatgtttattttttttaattcttatggaatctttacaactaaactattatttggttgtgtcctcaaattaaaaaaagatagacatgtaatgtatcaagttgaagatgtcactttctaatcacactcttcaggaatagtcacatttaataagtgacatttaggcttccagatgctcttctgtgcatacactattattctaaatatcttgcagagaaataaatgttggagaatagcctgcacaattccagagaagaaaagaattgtgaagcaactaaccattcacgtggttttaaaatttgattcagcaggaattcacagaactatcaatggtataaaacagagaatctgcaagtccagatctaaaaattcatccatttctaatcagtagggttaaagtggattatttagcaaataagattggaataacacactagccatttgcaaatgaagaaaggtaactgacttcttatttcaaaataaattccacataactcaaagatataaataatttttaaaataaaaacaaatgctagaatacatggatcaatcatttcatattttttggatgcaaaaagcgtttctagataaaacgtaaaacctaaaagccataaaaggaaaagattgatatgtttgactagataaaatttagaatgctggtaatttctttactaaattttaaaaagtcacaaccaaaagaaagataaaaatagactggagaaagacagtaacactatgacaagcaaacttctgttatccttataagaccccagagtcttacaagtcagcaagcaaaagatgaagagcccaagaaggaaatgaacacagcacattaacagaaggctcacaggagaaataaaacaaactttaaaaataggaaaatgtgcgtaatctcattctgaataaacaatgctgataaaatgaatgagataaatgctttgcccattaaattgtgaaaattataaagatcactaaatttcagtgctgagaagggcataggaaaatgggctttatcatatactgttaataggaatgtaaattaggacaatttggaaatatataacaaaaattttaatgtgtatacctagaaattctatgtataaaatatctatatattatttcttgtaactaagaattctaaatctaaataaattatagtatattcatattatggaatactaacaaagccattaaaaaattcttttaatgtaaaaaaaaatttccttcttagactcttcatcttttgcttgctgaattataacacttcgggtgttaaggataacagaactttgcttgtcataatgttactatgtttttccagtttctttttatcttttcttttggttgtgactttttaaaatttagtaaagaaattaccagcattctaaaactagcacggtagtgctacatatgctgataaagaaaaatgtctatgttattttgtcaaaagcttctagcaagataaaactctccaaaagtctccatctttctcttactccttccccctatcatttccatgaaaaatccgaaatgtgcagtgtatctatcagctattgctacattgatgctcaacaacaaatcatgccaaaactcagcggctttaagcaacatttattctcacaaattgtgttgaatgatctagattgggctctgctgggtgattctatgatattactaacagctaggatgactcagggatctgaaactgaaggaaagttagctgggttcagctgggaatgcctctgttccataagtttcccgtctttctccagagacaagcaggctaacccagctgcctctttttacagcaggggcataagagggcaagcagaaaaatgcaaggctggcctacccatcaattccacttcattttattggcaaagaagatcacatgaccaaacccagaatcaaggagtgaagaaatatatttccccttgggtagaaacttaaaatcacatggtaaaataggtggataggagaaagagtgaagagtcaagccattaatgcaatatcttacagtcatacatgaggacagcttaggttacatttacagaaagacacaaatgtcacctccctatttgaggaagctcttcctatctcatccatattgcagcaagactacagccacatgctttccattactttgtgaaataagttttgtctatatgtgtattgagaaactttagggaagaaaaagtatttgggtcatgcgaggacttcaatatacatggatctgttaatctaatagcaaaattataatcatttcttactgaaattgttaacattaaaaaaatactgttctcttcagtgtgaaatggaaggttttcccttttatatgattgatccagttgaaatcatatgcatatctttgggccaataacagtcactaggaaaatgccatgaacttattggcttggaaatggctcaccttttccagaactgagaatgagatgggtacctggtcaaaataggggtgacaaagaaagaagaaactgagaatgttggagaagaaaacaagaatgtctatcatcagaacgagggttttttttttttttaattagagagaaaaagagggaatattagaatgagaatatgcttagaaaaaagtttggaaggcagtgctccaaaatgttttcagtggttattggggaaaagaatgggatggtggtggatgcatgaaagcaggaaacttcctcttatttcttttgtcttctttttttttgaggggggtagtatatagatgtgtatatatgtatacatgcatatatatacatacatatgtatacatatatacattcatatgtatacatacatatatgggagtatacatgtatgcatacatatgtatacatacatatatacatatatatgggagtatacatatgtatacatacatatatgtatgtatatattattatacaaaataaaagtataaattatgtattaatataactcttacttagaattattattctcattttttctgtaaaatctagactataataaccttgatagcaagattttctatcctagagtcataatctgatttctcccttgtgatgtggatagtacaacagtatatttcaagatttcttatccttcagtattttaagtaattaataaatttcatcacagtttatcaaggccttcttattatacaaattgcagtgacaaatgctatggaacaagatgatacaacatgttcctacaagtcacatctctgcttctgcactttatctgctaaactgtcttagtgaaaaatcacataatgctgccaaacggggcccatataaatttgttttcctttatttgtgcttgacagcattcttttccaatgccctcgataaccattgtcaaatacactcaccttttactctaagtcttccattgaaccttggcctttctcattcccagaaaataagtttgcctatactttgaaaaaatgtagaccataactcatgtttttgctctcatttccta

SEQ ID NO: 1242 - DNA, 822 bp, Homo sapiens
ctccccaggagacttggaagatgcagaactggatgactactcattctcatgctatagccagttggaagtgaatggatcgcagcactcactgacctgtgcttttgaggacccagatgtcaacaccaccaatctggaatttgaaatatgtggggccctcgtggaggtaaagtgcctgaatttcaggaaactacaagagatatatttcatcgagacaaagaaattcttactgattggaaagagcaatatatgtgtgaaggttggagaaaagagtctaacctgcaaaaaaatagacctaaccactatagttaaacctgaggctccttttgacctgagtgtcatctatcgggaaggagccaatgactttgtggtgacatttaatacatcacacttgcaaaagaagtatgtaaaagttttaatgcacgatgtagcttaccgccaggaaaaggatgaaaacaaatggacgcatgtgaatttatccagcacaaagctgacactcctgcagagaaagctccaaccggcagcaatgtatgagattaaagttcggatccattccctgatcactattttaaaggcttctggagtgaatggagtccaagttattacttcagaactccagagatcaataatagctcaggggagatggatcctatcttactaaccatcagcattttgagttttttctctgtcgctctgttggtcatcttggcctgtgtgttatggaaaaaaaggattaagcctatcgtatggcccagtctccccgatcataagaagactctggaacatctttgtaagaaaccaagaaaagtgagtgtttttggtgct

SEQ ID NO: 1243 - protein, 80 aa, Homo sapiens [sequence omitted]

SEQ ID NO: 1244 - DNA, 4035 bp, Homo sapiens
ctccccaggagacttggaagatgcagaactggatgactactcattctcatgctatagccagttggaagtgaatggatcgcagcactcactgacctgtgcttttgaggacccagatgtcaacaccaccaatctggaatttgaaatatgtggggccctcgtggaggtaaagtgcctgaatttcaggaaactacaagagatatatttcatcgagacaaagaaattcttactgattggaaagagcaatatatgtgtgaaggttggagaaaagagtctaacctgcaaaaaaatagacctaaccactatagttaaacctgaggctccttttgacctgagtgtcatctatcgggaaggagccaatgactttgtggtgacatttaatacatcacacttgcaaaagaagtatgtaaaagttttaatgcacgatgtagcttaccgccaggaaaaggatgaaaacaaatggacgcatgtgaatttatccagcacaaagctgacactcctgcagagaaagctccaaccggcagcaatgtatgagattaaagttcggatccattccctgatcactattttaaaggcttctggagtgaatggagtccaagttattacttcagaactccagagatcaataatagctcaggggagatggatcctatcttactaaccatcagcattttgagttttttctctgtcgctctgttggtcatcttggcctgtgtgttatggaaaaaaaggattaagcctatcgtatggcccagtctccccgatcataagaagactctggaacatctttgtaagaaaccaagaaaaaatttaaatgtgagtttcaatcctgaaagtttcctggactgccagattcatagggtggatgacattcaagctagagatgaagtggaaggttttctgcaagatacgtttcctcagcaactagaagaatctgagaagcagaggcttggaggggatgtgcagagccccaactgcccatctgaggatgtagtcatcactccagaaagctttggaagagattcatccctcacatgcctggctgggaatgtcagtgcatgtgacgcccctattctctcctcttccaggtccctagactgcagggagagtggcaagaatgggcctcatgtgtaccaggacctcctgcttagccttgggactacaaacagcacgctgccccctccattttctctccaatctggaatcctgacattgaacccagttgctcagggtcagcccattcttacttccctgggatcaaatcaagaagaagcatatgtcaccatgtccagcttctaccaaaaccagtgaagtgtaagaaacccagactgaacttaccgtgagcgacaaagatgatttaaaagggaagtctagagttcctagtctccctcacagcacagagaagacaaaattagcaaaaccccactacacagtctgcaagattctgaaacattgctttgaccactcttcctgagttcagtggcactcaacatgagtcaagagcatcctgcttctaccatgtggatttggtcacaaggtttaaggtgacccaatgattcagctatttaaaaaaaaaagaggaaagaatgaaagagtaaaggaaatgattgaggagtgaggaaggcaggaagagagcatgagaggaaagaaagaaaggaaaataaaaaatgatagttgccattattaggatttaatatatatccagtgctttgcaagtgctctgcgcaccttgtctcactccatcctgacaataatcctgggaggtgtgtgcaattactacgactactctcttttttatagatcattaaattcagaactaaggagttaagtaacttgtccaagttgttcacacagtgaagggaggggccaagatatgatggctgggagtctaattgcagttccctgagccatgtgcctttctcttcactgaggactgccccattcttgagtgccaaacgtcactagtaacagggtgtgcctagataatttatgatccaaactgagtcagtttggaaagtgaaagggaaacttacatataatccctccgggacaatgagcaaaaactaggactgtccccagacaaatgtgaacatacatatcatcacttaaattaaaatggctatgagaaagaaagagggggagaaacagtcttgcgggtgtgaagtcccatgaccagccatgtcaaaagaaggtaaagaagtcaagaaaaagccatgaagcccatttggtttcatttttctgaaaataggctcaagagggaataaattagaaactcacaatttctcttgtttgttaccaagacagtgattctcttgctgctaccacccaactgcatccgtccatgatctcagaggaaactgtcgctgaccctggacatgggtacgtttgacgagtgagaggaggcatgacccctcccatgtgtatagacactaccccaacctaaattcatccctaaattgtcccaagttctccagcaatagaggctgccacaaacttcagggagaaagagttacaagtacatgcaatgagtgaactgactgtggctacaatcttgaagatatacggaagagacgtattattaatgcttgacatatatcatcttgcctttcttggtctagactgacttctaatgactaactcaaagtcaaggcaactgagtaatgtcagctcagcaaagtgcagcaaacccatctcccacaggcctccaaaccctggctgttcacagaaccacaaagggcagatgctgcacagaaaactagagaaggggtcataggttcatggttttgtttgagatttgttgctactgtttttctgttttgaattttcttctttgttctgtttttactttatttagggggactaggtgtttctgatattttagttttcttgtttgttttgttttgtgttgtctgtgaatggggttttaactgtggatgaatggaccttatctgttggcttaaaggactggtaaaatcagaccatcttattcttcaggtgaatgttttactttccaaagtgctctcctctgcaccagcagtaataaatacaatgccataatcccttaggtttgcctagtgcttttgcaattttcaaagcacttccataagcattccttccacctccttgataggcatttatggaaagcctgctacatgtcaatcatactgttaggcacaggggacctaaagacacataaaaggatggcattctgcctcataaattgcaaaacctaatgaaagtgactgcttggtaaacaaattattattatattataaaatgctataaaagagccatattgaaagtgccctgttggagacagggcaaatgccacaaaaatgatgtaaatttacatggaggaaaagtagaatctgcctggtttgtaggcagcagaagacatttttcatcagtgggcaggtgttctttaccttttgtagaaatgggagtcaagtctcaaataggaggctccacaaaatctcatgccaggtctctgataccttattcacagaagttctttgaagtatttattgttattttctttgacttatgggaaaactgggacacaggaagacaggtaaattacccaacctcacacgttaagtcagaactgggagccataattttgtatccctggtataaatagacaatctctcgaagaaatgaagagatgaccatagaaaaacatcgagatatctccagctctaaaatcctttgtttcaatgttgtttggcatatgttatctttggaatttagtgtctgagcctctgtctgttactgtagtatttaaaatgcatgtattataatcatataatcataactgctgttaattcttgattatatacctagggacaatgtgtaatgtaagattactaattggttctgcccaatctcctttcagattttattaggaaaaaaaaataaacctcctgatcggagacaatgtattaatcagaagtgtaaactgccagtagggcacccaggctgattcagctgatttcctaccagcctttgcctcttccttcaatgtggtttccatgggaa

SEQ ID NO: 1245 - protein, 220 aa, Homo sapiens
MDPILLTISILSFFSVLVILACVLWKKRIKPIVWPSLPDHKKTLEHLCKKPRKNLNVSFNPESFLDCQIHRVDDIQARDEVEGFLQDTFPQQLEESEKQRLGGDVQSPNCPSEDVVITPESFGRDSSLTCLAGNVSACDAPILSSSRSLDCRESGKNGPHVYQDLLLSLGTTNSTLPPPFSLQSGILTLNPVAQGQPILTSLGSNQEEAYVTMSSFYQNQ

SEQ ID NO: 1246 - DNA, 3941 bp, Homo sapiens
ctccccaggagacttggaagatgcagaactggatgactactcattctcatgctatagccagttggaagtgaatggatcgcagcactcactgacctgtgcttttgaggacccagatgtcaacaccaccaatctggaatttgaaatatgtggggccctcgtggaggtaaagtgcctgaatttcaggaaactacaagagatatatttcatcgagacaaagaaattcttactgattggaaagagcaatatatgtgtgaaggttggagaaaagagtctaacctgcaaaaaaatagacctaaccactatagttaaacctgaggctccttttgacctgagtgtcatctatcgggaaggagccaatgactttgtggtgacatttaatacatcacacttgcaaaagaagtatgtaaaagttttaatgcacgatgtagcttaccgccaggaaaaggatgaaaacaaatggacgcatgtgaatttatccagcacaaagctgacactcctgcagagaaagctccaaccggcagcaatgtatgagattaaagttcggatccattccctgatcactattttaaaggcttctggagtgaatggagtccaagttattacttcagaactccagagatcaataatagctcaggattaagcctatcgtatggcccagtctccccgatcataagaagactctggaacatctttgtaagaaaccaagaaaaaatttaaatgtgagtttcaatcctgaaagtttcctggactgccagattcatagggtggatgacattcaagctagagatgaagtggaaggttttctgcaagatacgtttcctcagcaactagaagaatctgagaagcagaggcttggaggggatgtgcagagccccaactgcccatctgaggatgtagtcatcactccagaaagctttggaagagattcatccctcacatgcctggctgggaatgtcagtgcatgtgacgcccctattctctcctcttccaggtccctagactgcagggagagtggcaagaatgggcctcatgtgtaccaggacctcctgcttagccttgggactacaaacagcacgctgccccctccattttctctccaatctggaatcctgacattgaacccagttgctcagggtcagcccattcttacttccctgggatcaaatcaagaagaagcatatgtcaccatgtccagcttctaccaaaaccagtgaagtgtaagaaacccagactgaacttaccgtgagcgacaaagatgatttaaaagggaagtctagagttcctagtctccctcacagcacagagaagacaaaattagcaaaaccccactacacagtctgcaagattctgaaacattgctttgaccactcttcctgagttcagtggcactcaacatgagtcaagagcatcctgcttctaccatgtggatttggtcacaaggtttaaggtgacccaatgattcagctatttaaaaaaaaaagaggaaagaatgaaagagtaaaggaaatgattgaggagtgaggaaggcaggaagagagcatgagaggaaagaaagaaaggaaaataaaaaatgatagttgccattattaggatttaatatatatccagtgctttgcaagtgctctgcgcaccttgtctcactccatcctgacaataatcctgggaggtgtgtgcaattactacgactactctcttttttatagatcattaaattcagaactaaggagttaagtaacttgtccaagttgttcacacagtgaagggaggggccaagatatgatggctgggagtctaattgcagttccctgagccatgtgcctttctcttcactgaggactgccccattcttgagtgccaaacgtcactagtaacagggtgtgcctagataatttatgatccaaactgagtcagtttggaaagtgaaagggaaacttacatataatccctccgggacaatgagcaaaaactaggactgtccccagacaaatgtgaacatacatatcatcacttaaattaaaatggctatgagaaagaaagagggggagaaacagtcttgcgggtgtgaagtcccatgaccagccatgtcaaaagaaggtaaagaagtcaagaaaaagccatgaagcccatttggtttcatttttctgaaaataggctcaagagggaataaattagaaactcacaatttctcttgtttgttaccaagacagtgattctcttgctgctaccacccaactgcatccgtccatgatctcagaggaaactgtcgctgaccctggacatgggtacgtttgacgagtgagaggaggcatgacccctcccatgtgtatagacactaccccaacctaaattcatccctaaattgtcccaagttctccagcaatagaggctgccacaaacttcagggagaaagagttacaagtacatgcaatgagtgaactgactgtggctacaatcttgaagatatacggaagagacgtattattaatgcttgacatatatcatcttgcctttcttggtctagactgacttctaatgactaactcaaagtcaaggcaactgagtaatgtcagctcagcaaagtgcagcaaacccatctcccacaggcctccaaaccctggctgttcacagaaccacaaagggcagatgctgcacagaaaactagagaaggggtcataggttcatggttttgtttgagatttgttgctactgtttttctgttttgaattttcttctttgttctgtttttactttatttagggggactaggtgtttctgatattttagttttcttgtttgttttgttttgtgttgtctgtgaatggggttttaactgtggatgaatggaccttatctgttggcttaaaggactggtaaaatcagaccatcttattcttcaggtgaatgttttactttccaaagtgctctcctctgcaccagcagtaataaatacaatgccataatcccttaggtttgcctagtgcttttgcaattttcaaagcacttccataagcattccttccacctccttgataggcatttatggaaagcctgctacatgtcaatcatactgttaggcacaggggacctaaagacacataaaaggatggcattctgcctcataaattgcaaaacctaatgaaagtgactgcttggtaaacaaattattattatattataaaatgctataaaagagccatattgaaagtgccctgttggagacagggcaaatgccacaaaaatgatgtaaatttacatggaggaaaagtagaatctgcctggtttgtaggcagcagaagacatttttcatcagtgggcaggtgttctttaccttttgtagaaatgggagtcaagtctcaaataggaggctccacaaaatctcatgccaggtctctgataccttattcacagaagttctttgaagtatttattgttattttctttgacttatgggaaaactgggacacaggaagacaggtaaattacccaacctcacacgttaagtcagaactgggagccataattttgtatccctggtataaatagacaatctctcgaagaaatgaagagatgaccatagaaaaacatcgagatatctccagctctaaaatcctttgtttcaatgttgtttggcatatgttatctttggaatttagtgtctgagcctctgtctgttactgtagtatttaaaatgcatgtattataatcatataatcataactgctgttaattcttgattatatacctagggacaatgtgtaatgtaagattactaattggttctgcccaatctcctttcagattttattaggaaaaaaaaataaacctcctgatcggagacaatgtattaatcagaagtgtaaactgccagtagggcacccaggctgattcagctgatttcctaccagcctttgcctcttccttcaatgtggtttccatgggaa

SEQ ID NO: 1247 - protein, 74 aa, Homo sapiens
MHDVAYRQEKDENKWTHVNLSSTKLTLLQRKLQPAAMYEIKVRIHSLITILKASGVNGVQVITSELQRSIIAQD

SEQ ID NO: 1248 - DNA, 3869 bp, Homo sapiens
ctccccaggagacttggaagatgcagaactggatgactactcattctcatgctatagccagttggaagtgaatggatcgcagcactcactgacctgtgcttttgaggacccagatgtcaacaccaccaatctggaatttgaaatatgtggggccctcgtggaggtaaagtgcctgaatttcaggaaactacaagagatatatttcatcgagacaaagaaattcttactgattggaaagagcaatatatgtgtgaaggttggagaaaagagtctaacctgcaaaaaaatagacctaaccactatagttaaacctgaggctccttttgacctgagtgtcatctatcgggaaggagccaatgactttgtggtgacatttaatacatcacacttgcaaaagaagtatgtaaaagttttaatgcacgatgtagcttaccgccaggaaaaggatgaaaacaaatggacgcatgtgaatttatccagcacaaagctgacactcctgcagagaaagctccaaccggcagcaatgtatgagattaaagttcggatccattccctgatcactattttaaaggcttctggagtgaatggagtccaagttattacttcagaactccagagatcaataatagctcaggattaagcctatcgtatggcccagtctccccgatcataagaagactctggaacatctttgtaagaaaccaagaaaaaatttaaatgtgagtttcaatcctgaaagtttcctggactgccagattcatagggtggatgacattcaagctagagatgaagtggaaggttttctgcaagatacgtttcctcagcaactagaagaatctgagaagcagaggcttggaggggatgtgcagagccccaactgcccatctgaggatgtagtcatcactccagaaagctttggaagagattcatccctcacatgcctggctgggaatgtcagtgcatgtgacgcccctattctctcctcttccaggtccctagactgcagggagagtggcaagaatgggcctcatgtgtaccaggacctcctgcttagccttgggactacaaacagcacgctgccccctccattttctctccaatctggaatcctgacattgaacccagttgctcagggtcagcccattcttacttccctgggatcaaatcaagaagaagcatatgtcaccatgtccagcttctaccaaaaccagtgaagtgtaagaaacccagactgaacttaccgtgagcgacaaagatgatttaaaagggaagtctagagttcctagtctccctcacagcacagagaagacaaaattagcaaaaccccactacacagtctgcaagattctgaaacattgctttgaccactcttcctgagttcagtggcactcaacatgagtcaagagcatcctgcttctaccatgtggatttggtcacaaggtttaaggtgacccaatgattcagctatttaaaaaaaaaagaggaaagaatgaaagagtaaaggaaatgattgaggagtgaggaaggcaggaagagagcatgagaggaaagaaagaaaggaaaataaaaaatgatagttgccattattaggatttaatatatatccagtgctttgcaagtgctctgcgcaccttgtctcactccatcctgacaataatcctgggaggtgtgtgcaattactacgactactctcttttttatagatcattaaattcagaactaaggagttaagtaacttgtccaagttgttcacacagtgaagggaggggccaagatatgatggctgggagtctaattgcagttccctgagccatgtgcctttctcttcactgaggactgccccattcttgagtgccaaacgtcactagtaacagggtgtgcctagataatttatgatccaaactgagtcagtttggaaagtgaaagggaaacttacatataatccctccgggacaatgagcaaaaactaggactgtccccagacaaatgtgaacatacatatcatcacttaaattaaaatggctatgagaaagaaagagggggagaaacagtcttgcgggtgtgaagtcccatgaccagccatgtcaaaagaaggtaaagaagtcaagaaaaagccatgaagcccatttggtttcatttttctgaaaataggctcaagagggaataaattagaaactcacaatttctcttgtttgttaccaagacagtgattctcttgctgctaccacccaactgcatccgtccatgatctcagaggaaactgtcgctgaccctggacatgggtacgtttgacgagtgagaggaggcatgacccctcccatgtgtatagacactaccccaacctaaattcatccctaaattgtcccaagttctccagcaatagaggctgccacaaacttcagggagaaagagttacaagtacatgcaatgagtgaactgactgtggctacaatcttgaagatatacggaagagacgtattattaatgcttgacatatatcatcttgcctttcttggtctagactgacttctaatgactaactcaaagtcaaggcaactgagtaatgtcagctcagcaaagtgcagcaaacccatctcccacaggcctccaaaccctggctgttcacagaaccacaaagggcagatgctgcacagaaaactagagaaggggtcataggttcatggttttgtttgagatttgttgctactgtttttctgttttgaattttcttctttgttctgtttttactttatttagggggactaggtgtttctgatattttagttttcttgtttgttttgttttgtgttgtctgtgaatggggttttaactgtggatgaatggaccttatctgttggcttaaaggactggtaaaatcagaccatcttattcttcaggtgaatgttttactttccaaagtgctctcctctgcaccagcagtaataaatacaatgccataatcccttaggtttgcctagtgcttttgcaattttcaaagcacttccataagcattccttccacctccttgataggcatttatggaaagcctgctacatgtcaatcatactgttaggcacaggggacctaaagacacataaaaggatggcattctgcctcataaattgcaaaacctaatgaaagtgactgcttggtaaacaaattattattatattataaaatgctataaaagagccatattgaaagtgccctgttggagacagggcaaatgccacaaaaatgatgtaaatttacatggaggaaaagtagaatctgcctggtttgtaggcagcagaagacatttttcatcagtgggcaggtgttctttaccttttgtagaaatgggagtcaagtctcaaataggaggctccacaaaatctcatgccaggtctctgataccttattcacagaagttctttgaagtatttattgttattttctttgacttatgggaaaactgggacacaggaagacaggtaaattacccaacctcacacgttaagtcagaactgggagccataattttgtatccctggtataaatagacaatctctcgaagaaatgaagagatgaccatagaaaaacatcgagatatctccagctctaaaatcctttgtttcaatgttgtttggcatatgttatctttggaatttagtgtctgagcctctgtctgttactgtagtatttaaaatgcatgtattataatcatataatcataactgctgttaattcttgattatatacctagggacaatgtgtaatgtaagattactaattggttctgcccaatctcctttcagattttattaggaaaaaaaaataaacctcctgatcggagacaatgtattaatcagaagtgtaaactgccagt

SEQ ID NO: 1249 - protein, 74 aa, Homo sapiens; identical to SEQ ID NO: 1247

SEQ ID NO: 1250 - DNA, 3963 bp, Homo sapiens
ctccccaggagacttggaagatgcagaactggatgactactcattctcatgctatagccagttggaagtgaatggatcgcagcactcactgacctgtgcttttgaggacccagatgtcaacaccaccaatctggaatttgaaatatgtggggccctcgtggaggtaaagtgcctgaatttcaggaaactacaagagatatatttcatcgagacaaagaaattcttactgattggaaagagcaatatatgtgtgaaggttggagaaaagagtctaacctgcaaaaaaatagacctaaccactatagttaaacctgaggctccttttgacctgagtgtcatctatcgggaaggagccaatgactttgtggtgacatttaatacatcacacttgcaaaagaagtatgtaaaagttttaatgcacgatgtagcttaccgccaggaaaaggatgaaaacaaatggacgcatgtgaatttatccagcacaaagctgacactcctgcagagaaagctccaaccggcagcaatgtatgagattaaagttcggatccattccctgatcactattttaaaggcttctggagtgaatggagtccaagttattacttcagaactccagagatcaataatagctcaggggagatggatcctatcttactaaccatcagcattttgagttttttctctgtcgctctgttggtcatcttggcctgtgtgttatggaaaaaaaggattaagcctatcgtatggcccagtctccccgatcataagaagactctggaacatctttgtaagaaaccaagaaaaaatttaaatgtgagtttcaatcctgaaagtttcctggactgccagattcatagggtggatgacattcaagctagagatgaagtggaaggttttctgcaagatacgtttcctcagcaactagaagaatctgagaagcagaggcttggaggggatgtgcagagccccaactgcccatctgaggatgtagtcatcactccagaaagctttggaagagattcatccctcacatgcctggctgggaatgtcagtgcatgtgacgcccctattctctcctcttccaggtccctagactgcagggagagtggcaagaatgggcctcatgtgtaccaggacctcctgcttagccttgggactacaaacagcacgctgccccctccattttctctccaatctggaatcctgacattgaacccagttgctcagggtcagcccattcttacttccctgggatcaaatcaagaagaagcatatgtcaccatgtccagcttctaccaaaaccagtgaagtgtaagaaacccagactgaacttaccgtgagcgacaaagatgatttaaaagggaagtctagagttcctagtctccctcacagcacagagaagacaaaattagcaaaaccccactacacagtctgcaagattctgaaacattgctttgaccactcttcctgagttcagtggcactcaacatgagtcaagagcatcctgcttctaccatgtggatttggtcacaaggtttaaggtgacccaatgattcagctatttaaaaaaaaaagaggaaagaatgaaagagtaaaggaaatgattgaggagtgaggaaggcaggaagagagcatgagaggaaagaaagaaaggaaaataaaaaatgatagttgccattattaggatttaatatatatccagtgctttgcaagtgctctgcgcaccttgtctcactccatcctgacaataatcctgggaggtgtgtgcaattactacgactactctcttttttatagatcattaaattcagaactaaggagttaagtaacttgtccaagttgttcacacagtgaagggaggggccaagatatgatggctgggagtctaattgcagttccctgagccatgtgcctttctcttcactgaggactgccccattcttgagtgccaaacgtcactagtaacagggtgtgcctagataatttatgatccaaactgagtcagtttggaaagtgaaagggaaacttacatataatccctccgggacaatgagcaaaaactaggactgtccccagacaaatgtgaacatacatatcatcacttaaattaaaatggctatgagaaagaaagagggggagaaacagtcttgcgggtgtgaagtcccatgaccagccatgtcaaaagaaggtaaagaagtcaagaaaaagccatgaagcccatttggtttcatttttctgaaaataggctcaagagggaataaattagaaactcacaatttctcttgtttgttaccaagacagtgattctcttgctgctaccacccaactgcatccgtccatgatctcagaggaaactgtcgctgaccctggacatgggtacgtttgacgagtgagaggaggcatgacccctcccatgtgtatagacactaccccaacctaaattcatccctaaattgtcccaagttctccagcaatagaggctgccacaaacttcagggagaaagagttacaagtacatgcaatgagtgaactgactgtggctacaatcttgaagatatacggaagagacgtattattaatgcttgacatatatcatcttgcctttcttggtctagactgacttctaatgactaactcaaagtcaaggcaactgagtaatgtcagctcagcaaagtgcagcaaacccatctcccacaggcctccaaaccctggctgttcacagaaccacaaagggcagatgctgcacagaaaactagagaaggggtcataggttcatggttttgtttgagatttgttgctactgtttttctgttttgaattttcttctttgttctgtttttactttatttagggggactaggtgtttctgatattttagttttcttgtttgttttgttttgtgttgtctgtgaatggggttttaactgtggatgaatggaccttatctgttggcttaaaggactggtaaaatcagaccatcttattcttcaggtgaatgttttactttccaaagtgctctcctctgcaccagcagtaataaatacaatgccataatcccttaggtttgcctagtgcttttgcaattttcaaagcacttccataagcattccttccacctccttgataggcatttatggaaagcctgctacatgtcaatcatactgttaggcacaggggacctaaagacacataaaaggatggcattctgcctcataaattgcaaaacctaatgaaagtgactgcttggtaaacaaattattattatattataaaatgctataaaagagccatattgaaagtgccctgttggagacagggcaaatgccacaaaaatgatgtaaatttacatggaggaaaagtagaatctgcctggtttgtaggcagcagaagacatttttcatcagtgggcaggtgttctttaccttttgtagaaatgggagtcaagtctcaaataggaggctccacaaaatctcatgccaggtctctgataccttattcacagaagttctttgaagtatttattgttattttctttgacttatgggaaaactgggacacaggaagacaggtaaattacccaacctcacacgttaagtcagaactgggagccataattttgtatccctggtataaatagacaatctctcgaagaaatgaagagatgaccatagaaaaacatcgagatatctccagctctaaaatcctttgtttcaatgttgtttggcatatgttatctttggaatttagtgtctgagcctctgtctgttactgtagtatttaaaatgcatgtattataatcatataatcataactgctgttaattcttgattatatacctagggacaatgtgtaatgtaagattactaattggttctgcccaatctcctttcagattttattaggaaaaaaaaataaacctcctgatcggagacaatgtattaatcagaagtgtaaactgccagt

SEQ ID NO: 1251 - protein, 220 aa, Homo sapiens; identical to SEQ ID NO: 1245

SEQ ID NO: 1252 - DNA, 154504 bp, Mus musculus
  misc_feature (1)...(154504): n = A,T,C or G
gttgacttttagaagagaatctaaaaggttatttggaaagaacattagcccaataagaaaaggattgatctataaagaaagattaaaggactgtaagattagagcctagctaatactctgcttaaatttgagattaaaaacaaaataaaaacagctcttactattcttctgatcatgttcctttcatgtgaacttaaaccatgcatttctgaaaggaaaactgctaataagccttctctccgaggctttctccctttccctgtcactgggtcattaaagcagtaagttaccaaatctaaactctaaagagacctaaagtgttcaggggggaattctgaacagaacatgcagctcagattcgtgtttacccactttctggcactttggattcaggaccacatgtcaggtcccacccacagatgatctgggctcatagggcatttgcctagcttgcaaggccctgagttctatacctagcactgttttggatcattgattttgtatcctgaagatttgctaaactctcttattcatcctaaaggttccgtagtctgtgtcttcaagtttcttcgtggcagtctgtctctgcaaacggatctggttttcttttttttccttccatgcgagaaagtggtgagacagtaaattgctcccaatccctgaaaatcccagtctctgagtcagacaccatgctggtcacagctttttgtggataaccttcattacgttaatgcattcccattctatttcccatttgtggagtgtttctctcttgggtatactttctgcttctgtggagaaaattgtgtgggatttgtccttcagtatattgatgctacattttaaacattgtcctgacaagtattgacaacactgtcctgtggagcaatattgcttggtacctccccattaagcctgatcagaaaggctcagatcttgtagaagctttgctctaagaaaaacaaacaaacacaaaaactctttcaactgtgacaagagagataattcagcattggctgccctcgcagttttatgaaacttgagttccactgccagcttccaaatggtggctcgggaccctctgcaacgccaggaaatgcaaaatcctactctggtccctgaagttaccaggcatgcatgtggtgcatatatacgcgtatgtatgtatatatagtatacatgcatatatgtatctataaacatataagcacatgtatgtgtgtgtacatatatataaacacatatgtaggcaaaacattcatatacatgaaataaatcttttttaaaaaataaaaactcattcaaactcttcagaaatgtggctgtaacatcatcttccattgcttcctggagacttcactatctatgaaattgttcactttattgcactacaaatgtttttctccatctcatgcagtgtgactctcagtggactatcatgttactctttccattaactctttgtagtgtttcttctgttggactccagtactaaccatgttacagttgctttcatggcaaagtaggatttggaaaagtcatcacatctggtattttgttattcttgagtctatccttactgaactccgccagtgctggggatcttataggacagatggatactatcactgcccaagggtctcccaacttggtttagcaccagacagccagagcagatagagactgagtcatgtctttgaggaatgatgggtaattgagtgtcacagcaatgagactgttggcttcttgtcatgggccagttcatcatagtttggatgaaaagccaacactctgcttccaaaagatgcttccacaatccaggtcctatgtttaaagactactctgcatcctcttccaagtgtccacttccaaggtgtagtgcaggttttataaagaagtaaaaggcccgacttcatctgcaggaccttacaggtagttctggactacataacaacatctgaatccatgggagctggaacaatgcctcctagcctaagatctcttatcctactgctcttaaagaagaccagagtttggtttccagcatccatgccggggagcttgcaactgcccatagcttcagtttcaggaatccagcacctacttctggcctcctgacactgcactcatacacgaactcacactcacacacacacatataagcataattaaaaattaaagtctagtccttaaaaaaataatacaaaacacacctcggaatccatgggcttccgagatagttcacttgtaaagtgtctgtcttacatgcacgaagaattgaatcagaccctcaacatctacatcatccacaacaaaaaaagtcaggcctggtgacacgtgcctgcagtgtcacctgcattcccagcagtggggaagcagagacaatgggttcctggagctcacaggcttgccagtctagcctaaccagtgagttccaggccacatcaagaccctgtctcaaaaaccaaggtatgagcacctgaggaatgacaccaaggtcaccctggctgctacatgcactacttaatgctaagcatctccctccacacacaccaaaacaaaatctgaactctctttgtaatgtgctgtgtttctccaacaaatttttgacttgctatattagttttccctaactgatccctgttacctcatggagtaaaaaatactttgtaaattccagcttggggtttcttcccgccatttgtgttttccagatgaaagaggcacacagccttatatttttaatataccttaagcagcacaattgtgggcagctgcctaccctccatgctgttagaatccacctcctatccatagtccaagttattaattactatgtttatataggctgcttttagccctttgggcccatggcagctctggcagctctcctcgattctctatctcatggcggctcccttttaccctcccatgatggcttttttctctttcttatttattcttccatgtatacttaaaaacacttattaggtttcccaggctagagaccacaagaaaggagcaggaagagaaaaaatcctgctgtgtgtttcatccgggaacataaatggcccaaggcaggaagaaattctgcaccagaatttataaaatgttttttactataaccttgtttctctaaggtgggtcgatgtgtctatttaaaaatctctcaaactgggtgtggtggtgcaggacattaatctcagcacaaaaggtaggaagagacctatgagtttgaggctagcatggtgagttcctagccaaccacagtgagaacctgcctaaaataagtgttctctccctctcccctctccctctccctctccctctccctnnnnnnnnnnnnnnnnnnnngttagcttgctttctattgctgcgataaacaatcaaaagcaacttcaggaggaaagggtttatttggcctagataactggggtctcagtccactgagggaagccaagacaggcactgggaggcaagaactgaagcagaaaccctggtcactacatctctccagggcttgcttttgtttgtttgtttgtttgtttgttttttcaagatagggtttctctgtgtatctttggctgtcctggatctcgctccatagaccaggctgacgtcaactttagacatccacctgtctgtgccttccaagtgctgggactaaaaggtgtatgttgctatgccagtccagcttgcttttttttttttttcgagacagtgtttctctgtatagccctggctgtcctggaactcactttgtagaccaggtgacctcaaacccagaaatctaccggtctctgcctcccaagtactgggattaaaggcatgcgccactaccacccggctcagcttgctttttaaatacagctcaggactacctgtatcaagtaggtaagatggaccccagcacagaccctcagcagagatggaatggacagatgatatgcagcataggtacaaatgtgtgatcagttatctcatgaggtctagcatactgttgccttcattcttgtgtgcatatgtgggtccccatatgaactagacaccttagcacagtgttccttctgaataaggtttccttgagtccatagtagagcctcaaacacagaaggcagagttggttggcccttccctccgacagcccttctcagtaacttgcatttatccccttgccctacacacaaggtaccagcgaggtaaatcattgttccaactgtgcatatcaggacaccgagctttgtttgatttgctgaggtgtttgtttgtctggtttggtttggttgttgctgttgttgttttgcacacctgaagaatatcccataaagtagagcaactcatttaacccatttgcctggcccccagccttgctccacccacagacttcctattctgaagaatccccatagaactccctggggggaaacacccactttagctggcacagaccaaataatgggatcattagtaagtcagagtcttcttaaaattggaaggatttccaaatagctatttgtttccctggtaaattattggatcctatgggtatcttgggatagacacacatttgaaatatgtttccataatttataacttagcttttccaacttcttgggtgttttcactgtctgtaaggaagaattttctgctgtgggatccaagaccaaacatttcctggagactttgttctgttttctgaccttcatcttctttcttctaaagactgaagaagaaatttctgaccagtgcaggctgtcagcagcagcctgtggcccaaggttcaggtaaggaacacagggccatgaggccctggttatttctgggcagtaaggccagaatgtgttaaccctttgttttatggggttttattgtgttgttggtttgtttgttgtttttgactgcctctctatgtcaccctagctggctcagaactcaccatgtaggccagactgccagactgccctcaaactcagagacccatctttattcctgagagctgagactaaaggtgtgcaccatcacagtggccttgactgagattttatttattcatttattttatgtatatacactgtagctgtcttcagacacaccaaaagaggacatcagattccattacaggtagttgtgaaccaccatgtgggtgctgggaattgaactcagaaagagcagttaatgattttaactgctgagcgatctctccagccccatggctgagacctggagctctttatagaaatagatcttgcagaataggtcttgtagatgacatttgtttgtattctaagatttgaaactagttagttctgattttctctgatggtttgttaaaatctggatgggggtgtattggcttagcaattgggtgatagaattagggttgttgctgctttgttttgtttgttttgttttgttttgttttgttttgtttcgagacagggtttttctgtatagccctggctgtcctggaactcactctgtagaccaggctggcctcaaactcaagaaatttgcctgcctctgcctcccaagtgctgggattaaaggggtgcgtcaccactgcccggcttgttgtttttttatttaaaagatttattttatttatgagcgctctatctgcatgtacatatgcatgccagaagagagcatcagatcctattgtaaatggttgtgagctaccaagtggttggtggggactgaaatcaggacctctgaagagcagccagtgctcttaagccctgagctatctctccagccccagaattaggnnnnnnnnnnnnnnnnnnnnatctctgagttcgaggccagcctggtctacaaagtgagttccaggacagccagggctatacggagaaaccctgtctcgaaaaaccaaaaataaataaataaataaataaataaataaataaataaataaataaataaataaaataaatcttgaaaaacatccatattgagcccttcataagtttaaggcctatgtgaaattactgcccccacccccacccccagtcccaaataaaccttttgttagcttgctttctattgctgtgataaacaatcaatcaaaagcaacttcaggaggaaagggtttatttggcctagataactggggtctcagtccactgagggaagccaagacaggcactgggaggcaagaactgaagcagaaaccctggtcactacatctctccagggcttgcttttgtttgtttgtttgtttgttttttcaagatagggtttctctgtatatctttggctgtcctggatctcgctccatagaccaggctgacgtcaactttagacatccacctatttgtgccttccaagtgctgggactaaaaggtgtatgttgctatgccagtccagcttgctttttttttttttttttttttttccaagacagggtttctctgtatagccctggctgtcctggaactcactttgtagaccaggctgacctcaaactcagaaatcagaggtctctgcctcccaagtactgggattaaaagcatgcgccactaccacccagctcagcttgctttttttttttttaaagatttatttatttattatatgtaagtacactgtagctgtcttcagacactccagaagagggagtcagatctcgttacggatggttgtgagccaccatgtggttgctgggatttgaactctggaccttcggaagagcagtcgggtgctctaacccactgagccatctcaccagcccctcagcttgctttttaaatacagctcaggactacctgtatcaagtaggtaagatggaccccagcacagaccctcagcagagatagaatggacagctgatatgcagcataggtacaaatgtgtgatcagttatctcatgaggtctagcatactgttgccttcattcttgtgtgcgtatgtgggtccccatatgaactagacaccttagcccagtgttccttctgaataaggtttccttgagtccatagtagagcctcaaacacagaaggcagagttggttggcccttccctctgacagcccttctcagtaacttgcatttatccccttgccctgcacacaaagtaccagcaaggtaaatcattgttccaactgtgcatatcaggacaccgagctttgtttgatttgctgaggtgtttgtttgtctggtttggtttggtttggttgttgctgttgttgttttgcatacctgaagaatatcccataaagtagaacaactcatttaacccatttgcctggcccccagccttgctccacccacagacttcctattctgaagaatccccatagaactccctggggggaaacacccactttagctggcacagacctaataatgggatcattagtaagtcagagtcttcttaaaattggaaggatttccaaatagctattgcttccttggtaaattattggatcctatgggtatcttgggatagacacacatttgaaatatgtttccataacttataacttagcttttccaactccttggggattttcattgtctgtaaggaaggattttctgctgtgggatccaagaccaaacatttcctggagactttgttctgttttctgacctccatcttctttcttctaaagactgaagaagaaatttctgaccagtgcaggttgtcagcagcagcctgtggcccaaggttcaggtaaggaacacagggccatgaggccctggttatttctgggcagtaaggccagaatgtgttaaccctttgttttatggggttttattgagttgttggtttgtttgttgtttttgactgcctctccatgtcaccctagctggctcagaactcaccatgtaggccagactgccagactgccctcaaactcagagacccatctttattcctgagagctgagactaaaggtgtgcaccatcacagtggccttgactgagattttatttattcatttattttatgtatatacactgtagctgtcttcagacacaccaaaagaggacatcagattccattacaggtagttgtgaaccaccatgtgggtgnnnnnnnnnnnnnnnnnnnnnnnnnnnnnnnnnnnnnnnnnnnnnnnnnnnnnnnnngtcagcagtttagagcaccaactgctcttcctagaggttctgagttcaattcccagctaccaagtggttggtggggactgaaatcaggacctctgaagagcagccagtgctcttaagccctgagctatctctccagccccagaattagggtttttattaggagatagatgtctggtctgctgtagcatcctgccatcccagattggtaatcccagagtctgggagttagctcggttccctgctactgatcagtcctgttttctctctgtctctcctaggatggccactatctcaggtaatgtttcctctcttaaggaagttatagaaatcctcccttctgggctggaaagatgactcagcagttaagagcaccgactgctcttctggagatcctgggttcaaatcccagcacccacatggtggttcacaaccatccgtaatgacatctgacgctcctctgctgtgtctgaagacagctacagtgtacttatatatagtaataaataaatgcttaaaaaaagaaatcttgccttctataattttttattagatattttcttcatttacatttcaaatgctatccccaaagccccctataccctcctcctgccctgctccccaacccacccactcctgcttcctggtcctggcattcccctgtactggggcatatgatcttcgcaatactaagggcctctcctcccattgatggccgactaggccatcctctgctacatatgcaactagagacacagctctggggagtactggttagttcatattgttgttcctcctataggattatagacccctttagctccttgggtactttctctagctccttcattaggagccctgtgatctatccaatagatgacggtgggcatccacttctgtatgtgccaggcattggcatagactcacacaagagagctatgtcagggtcctgtcagcaaaatctgtctggcatatgcaatagtgtctgggtttggtggttgtatataggatggatccccgggtgggtcagtttctggatggtctttccttctgtcttagctccgaactttgtctctgtaactcctgtctctgtaacacaatggagtactactcagcaattaaaaacaatgaattcatgaaattcttaggcaaatggacgcatctggagggtgtcatcctgagtgaggtaacccaatcacaaaagaacacacatggtatgcactcactgataagcggatattagccccaaaacttagaatatacaagatacaatttgcaaaacacatgaaactcaagaaggaagaccaaagtgtggatactttgttccttcatagaatggggaacaaagtacccatggaaagatttaagtttttgagtctgatctgaactagcatcttaatggcctttcccatcccagtggctggtccagggccagtggatactagtaatatgaattggcgctggtggggctgtcctagactgccaagacaacttctggctgtgtcatcagtcatcttaagtctcaccacttctttcttcatcatcgtgctccatggatgcctcccgaagaaaatgattctcaattcatgttatatgactccagctgtgtctcctgttaccaggaaaccctcaccccacttcactcccgccccagacccacacgctccctaaagtctccagttactccaacctctggagatccattcattccacagggactagggatgcaccaggagtctgagggtggcagcaggcaaggagagcgtctttggccccgagctgggggctgcctgtagcgtggggcagctctgactgctgcctctccccgccttccccgtccccaaagaggacacccctccttccgcccgcccgcttccaacccttgtacggcaccgcctcctcgcgccgccctttcagggagcctcccaggcagccagcaagcgcggagagcgcactgggatgggacttgaaggcggcttctcaggacacggcgctggcgcgggattcttgttcgcgtccggggatcggtgcccaaggagctctgcggtcctctgcggggcgaggcggcggaccacggagactgacactcacagctgctcccctgtctctcttcccgggtgtcggcggcggtggctgcaggtgagcgcggcgcgctgacccgggagcagatgacccactgaccgacagacgcaaaatctgtccctctcctgggggacccgctgtctccctgtggagagtgggagagaaaggcggcgctgcaggtcccctcggccgggagaagtcccgccacgccgggccaggcgcgggacacatggggcggcagtagtacccgagggccccgcgggggcgctgtgcttcgctgcagggacactcagaacccctccacactgaccagggaatagggacttgttgagtgggtttgcagtgacaatcctatctaccaggtagaaaataacttggttcctcctgtaggctggtacctcaagaccagtgtcatctagatttcctttgctttctgtgtccagctctggcttccttgtatttcggaagagggataagaagagggcattttgtgttgctggaaaactggacgacagtttggggagaggacagaaaaatatggggacaaacccttgtaaggtctcccggagttggtgttctggagatactgtacagtaatcactgtggcgctcccacagtgcatctacaggatgcaattcccattagcctttgaggaatggacaacgaagctgtaagggtaaaggacagaggtttgggaatcagcaggcctcgttcaaaccccagcggccaagtttacaggctggagtacttggagacaaccagcaacacaatgcctcaattttctcatgcatctagaggggattataatgcctacaggattaaatgagatttcatggaagtacagagaatagttctaaaagtctcttactgctagtgagctctgctacccacctttctagaaaaggaaggaatctgtgtgaacactgaattcaccccctccctaattctaggacaaaaccttttgagggatgctcgaagatggcagataatgtatatgtgttagtggaatttttgtgcaaacgtccatttgagaacattctctctgcctgcctgcttgcttgcttgctttctttctttctttctttctttctttctttctttctttctttcttccttccttccttccttccttctttttttctttctttctttcttttctctctctttctttctttctttctttctttctttctttctttctttctttctttctttctttctttcttttcaagacagggtttctctgtatagccctggctgtcctggaactcactttgtagaccaggctggcctcgaactcagaaatccgcctgcctctgcctcctgagtgctgggattaaaggcatgcaccactacgccctgccctgccttctttcaaagtgataatttcacaaagccagccaagataccaaggtgagtttgtagccaggaaggtttcctctaagcctcctgtttattctgtttagaaggtttcctctaatgtttgttctcttataaactccattgaagaaggaaaggctgcaggttttcatcttctatctcccttctgttcctgctttcatttcagttgacagacttcagcttcagacccccacataaccagccagatctcttctataaacccaggttttggaggttctggcttccagagtccagacccaggtggtcaagaggcatggggcctgaagttcatcgctgaggatatcatagcataattgaaacctgagacagccttggataacaggcaggtcaaactcctattagctaagaccacgcatgtctgacagcaaaaggctaggtgaaagctgggcatggtggtgcatgtctataacccaacacttgaaatgcagagaggcaggagggtccgaagttcaaaatcatccttgattacatagtaactctaaaacaaacctggactacatgaaaccctttctccaaaaaccaaaaggggaaaaaaaaaagacaattggaatgaggctcaagattttaagaaaggcaaagagatgttgctccttgaaagacaaggaagaaaaatgagccactggagagtctgaaaaacaatttccagtttgcctagaagcagttcttattggtaactgagagaaggcactgagatatgggagtgtgaaggaaagagggggagaaagcttggtctcaggggaagctgagtgagtgagcagtgaccaaggagatgctgggatagatagagctcaatggagaggtaacaccagccccgccagcaagggcctttccagaagttgctctggcatttgcttgctggttctatcccatgcacaatctcctttcccgggagtcccagttctctgggggaagctaagcgggatttccttccctgtctaagggaacaaacacgggggatgacatacacagctctagggatggctgataccccagagagtggtgtacatcgtgttgctaggaaacagtgccaggatgctcttccaagagctctcagaactccagctcattttagcagtgcctcagagagtctgggtgtgtaaggcctagactgcaaaattggctgcagccatggaagaggttaggagacaggaaggaagccgagaggaaaaagtgaagtgtgtgcattcctgaatgtggtcaggatgcagagggcagatggaaactggtctaggtgtagacagctactaagccaaggagtcactctgaccatgaaaggacttgaggaagagaagatgagctccttgctggactagctgagtcagcagcccatcttcacctctagttggaagtcacagacaacatgtcaggttaacccagtaataaccagggtgtgaagtgtcgagctgcctatgggtagtctttatgttctagcatgcattggcttccggtttgctggccatgcaggagatggcagttctgataataggtggaaggaagataggaaaggcccagctctgagatttagtctcagcatggcctgattatatgtgaatacttagagtgaaggacacagttgccgaactgatgtcatctctctgattgcctgagaggtttcggggggccggggggggggtttcttcattgttttaccagtcaactagctctgaagccttggagggtctctagctataaactttagcgttctgttctcaaaagtaagatcttatctgctttggtggggatcaagcaaaaatacttggttccctgcctaacctgtcataggcactaagctaacattaatgttctttctacttttttcttttttttttttttaagatttatttatttattatatgtaagtacactgtagctgtcttcagacacaccagaagagggagtcagatctcattacggatggttgtgagccaccatgtggttgctgggatttgaactcaggacctttggaagggcagtcgggtgctcttatctgctgagccatctcaccagcccctactttttttcttaattatctacatttttattgtatgtattttgtgtatgtatctgtgttagcacacacatagaggtcagaagacaacctgtggaagttcgttccctgctaccacatgggtcagtttacccactgaaccatccccccagcctgccacttccttttcttatgtgaatggggcttagcattggctatagacttttttaggagagcagggttctgtgggtcatgcttaggtagagataccactttgttgtcatgcctcttactgatggttcattacataccagagagttgtgacacacaagtgaggtcccttgaatatagacagccagatctctcaagacccacagctcatttgttcttgactctggagggaccctacttttctggtgactcagatagtgatgcttagaaggtccccagctgttagagcagcctcctttctctgtcccaacctcttggtaaagcttcctaaaagaacccattgtctcatggaaaggagacaattggctaaaacaaaagtcaaagccttgcattatttcaaaacattctttctgtgccccctgctgcttcactggaggcagtttctcacacaaaagctctcatttgctcagagttgaaaggactgtccttaaaagtcttttaattttcctcttagggatgttacatatttttgagatgccaagagctataaatgccaaaccaagaaagtaccattgacttgaggacatgcatcaacttattattatgtgaaaaatccatattgtctgattataattatattacataatattgccattattatgtatttatatagtatcttttctatttttattaccataaattagtgaatatagtaatgggtttcattacaactcttcagacacatacccaatgcatttagaccatatttgcccccattatcctttcttgttcccttcctgatcccactgtgtggtgcatgacccaaccctaaccctcttttctctctctgtctctctctccctctccccccttctctctctctctgggtttgtgtgtgtgtgttttaagattggttacagaaatatggggtaagttacaatggctacaccactgaataaaatgtctctctctctcccaacaaccattagctacttagagatccttggggaggggcagggtctggaagcttgtctcccctgcacggggtcggagggggtggggcggatattaacaggcccacccaaccctgtgcaggtcttgtataggtaaccagaactgctgagagttcgcccatactatagccaggccatgcccagaagacaccattccacaatatttcaacccttcctcctgctcttcttcaatgccatttctttattttataaatagcttttttgaagtttaccatacagtggaattcattaattttaaagggtatgattggtaaatttcaacaaatatgtcactccatcataaccataacgtaaatgttcccatagcctcctagctctttccctttggctgctctatggctggttcccctttcttacccacaagcccattggtttgtttcctactcttgttatgtagttctgcctttattgaatttcctctagtcagagaattcagagcatagtccttttgtgtctgctgctttcatttggtgtcgtgctggggttcggctagcagagcacccctagttgctcagtaggagtccagtgtgtagatgctctgtaatctgtttcccactcatcagcggaccatctattgggtcactcccatgctcagtgttggaaagcacgacctctgcaagcatccgggaaagagttattgtgtggatggatgctcttgtcttctgactaagtgtgtagggtcaggactcagagaggacaacgcttctgttttcctggggtttgaagggtttcttaaggtgtggcctttggtgctaaaagtgtgggtgaatagagacagtgagttaccttttcccgtgttatttagctataactttatgaagagctgtcaactgtgctccagaatgacacaccgctttgcatgcttaccaacaaatcatgaaggttccaatgtccttgcatcttctcaacatggcaggcattgtgttatggtggctacctagcaggtttgtcatggtgcctcatggtgccactgtctgtgttttttttttaaacaataaacatttgaacgtcttttcatgttcttcccctagttatcctcttggtagtggtttgaataggaattgcctccacagactcatcctgtatttgaatgcttggccataaggactggtactattaggaagtgtagcattgtgtggagaacctctgtttgtaggaggatgtatattaattactgtggaggtgggctgtgaggtcatttatagtcttaagctatgtccagcgatacagtctcctgctgtctgctgactcttagctccttctccagcaccatgtctgcctagacactgcggtgattctcaccatgacaataatggactgaacctctgaaactgtaagccagccccaatgaaatgttttcctttataagagttgccatggtcatgccatgggtgtcttcccacatcaatagaaacacaaactaaaacattcttcaaacctttgcatattttaaagtggtccgtttttttattgaaaagagaatacatttttatattaactatacaaatacttcatcatatatatattcataaatatgttctaccagtttgtagcttaccatgtcatttccttttgaaatgagaaaactttaaatactttcagatatttatatatatttaaaaattgtgaattggaggctgatgagatggttcagtgaataaagttgcccattgccaatcctgacaacctaactttgattcctggaattgacatggtagaaggaaagaatcaaattttgcaagttgtcctctgagtttcatgtgcatactgtagcacacatgtatcatacatgtgtatacacatacataaaataaataaatgtaaaaagcttttaaaaattatgaacttcaatattgttttgtaagtaaacatattagctggttttatgctaatgaaatggctcaccatgacaaaatttgtcatgtatcattctgtactgaatggcttgtgtgcagaatgataagactagcagccagggctctgtagagcagcctggactcaaacagagctttgcctgtctctgcctcctgagtgttaggattaaaggtatttgacaccaccaggggctaagaagtttctttgataagaggtatgaactaaacttaactgtataaggataaatatttagagtatggttagaaactgtactggtttagtaaagttgtgtttaacccatttttaacattacattggaacttggcatggtggtggggagacaagagacaggaggatgtccttgtgagctggaggccagccagagttagatagggagaccctatctcaaaaaataaactccaacatcatagatcaacatgcacacataattggctggcatgcagaatgcagaatgataagaataacaacaaatatggctggagggatgactcagtggatgaaggtgcttgtcccccaccctgatagtgagttgagttcataatatatttttgtatggaacaaagcagattgaactggacaatattctactacacaaaacaaatcagaaacagaaaaataaatttcattaactcacagtgatgataccacaccatctatgtcgtagcaagttgtgtgattaatattgagtcattatgaaaacaagtaatagcttttaagatgatacaaaggaccaatggctggagagatggctcaattgttatagaaagtatctaatcccaatccaggatttctaccctgcctgtaaccatttagttcctgaataaaagacacatgcaatctctatgtttacaagaagtctaatcaacacaagagctgagcagatatctaccctgtatgctattaaaaatctatttcctatagctaaccttgaatttgttaactccaattggccatccctcaggtccatgttttcatgaactaacccatggcagctcctcctttctcctttctccttgtcctagtggttctctctcaacccccaaccccaggcctgggaaccctaaaacctgcctatgtctcttctgcccagctattggctgtcagcatctttatttaccaatcagaaataatctggaggcaagcatcacttgggtctacatgcagactctccctcaggggcaaccaggtcttagagacccacatttagcatcacaatacacagccagagacctttactgaggagcattgactgctcttgcaaaagactgaggttgagttcccagcactcacttgatgatgcccagttgtctgtaactacagttccatgggctctgttgtcctcttctggactacagaggtagtgcatgcatggggtattgcattcatgtactgcatagtactcataaatgcaggcaaaacacctatgcacataaaataaaataatttttaaaaatgaaaagaaaaatagcaagatagtctacattatcttcctttttcttttccgaaggaatctcagagttaaaggaataaaaagtagccagtctaactagaggactctaaactatttagatgaggaaagataggagttacccaaaatgaataaatttaggcaaattacttgttagagttagacactaaataaagagtgcctatctttaatacaatcttggtacttagtaaaaagtttcgggagttgacgggcttgagttcctcagcaggtcagcttctaaaagcaattcgctgaacagtggtgggggttgtttgtttaaattctggaaagtggtatttgccttacgcctgctcccttccttcctctatcagttaaacagcagtggcctttcatgaatggacacttgtggattttacattgggtcagtttcgttttctgctggattaatgttatacatgaccttggcaacaagatagttgatttcactgagcctctgggaatgtaggaagaatgctagcttaatgaatgagttaatccaagtaaagcatttagatgtgactggcagaggaacagaattccagccttagtcactgtgctgtgctccctcgtaataaatgtatacacgtttggtgtggtgttacatgataagctgaggcaggaggatgatgggttcaagattaacttgggctacatagcaatactctattaaaatagaaaggatgtaggaggctgggggctgggggcttgggactgaaggttgggtctggggtctggaggctggacgttgggtctggtggctggaggttggggctggggtctgggatctggaggttggggctgggggctgggggaacacaactggcactgtcatactacccatgtcagctgcacattgatttctagggacattaataattaattaataatttgtataatttgctattgataggcagaaagaccattattacctgaattctaggacctcttttccttttttcacatctaagatgtagaatgtgcctatgattaataaatagtaccttgaagtcaaaaaaaccgtcaagatagatttgtgatccaaggtgatgatagacttcccatggcccctgccagctcaagagaactccggaggacctggccaacgtgtggccccctcacgtttggaaggggcaaagtcagacaattagcatgtttgggacctgaaaaatcagggcaatggggcagcagcaccctaacatcagggacacccagaaatctaacttgcctttctcatgttgtattatagctgcagccctgctcctcttgaagatggagaagatgttggtggggtgcttgctgatgcttgggcagctcttccttgtcctcccagttgacggcagagagcgtccccaagccaggttcccttccagaggccgtcatgtccggatgtatccgcagactgcactgctgggtgagtgagaggtcctgcagttacaggcagtgtgtgtggtgtgtgtgtgtgtggggggggggnnnnnnnnnnnnnnnnnnnnnnnnnnnnnnnnnnnnnnnnnnnnnnnnnnnnnnnnnnnnnnnnnnnnnnnnnnnnnnnnnnnnnnnnnnnnnnnnnnnnnnnnnnnnnnnnnnnnnnnnnnnnnnnnnnnnnnnnnnnnnnnnnnnnnnnnnnnnnnnnnnnnnnnnnnnnnnnnnnnnnnnnnnnnnnnnnnnnnnnnnnnnnnnnnnnnnnnnnnnnnnnnnnnnnnnnnnnnnnnnnnnnnnnnnnnnnnnnnnnnnnnnnnnnnnnnnnnnnnnnnnnnnnnnnnnnnnnnnnnnnnnnnnnnnnnnnnnnnnnnnnnnnnnnnnnnnnnnnnnnnnnnnnnnnnnnnnnnnnnnnnnnnnnnnnnnnnnnnnnnnnnnnnnnnnnnnnnnnnnnnnnnnnnnnnnnnnnnnnnnngctatgaaggtgaagtggtttcagagaccgttcagggttgtgctaaagccaatgtttactagatatttagaatttatagaaaccacttcatttacttccctgaaaatgctccaaagccaactctctgcttccatttcacaaatgagggaatggagcctcagagaggttacccagtgagaaacagcagcaggacttgaatccagacccattccaaaatatgttctcactgcgtttaacagctagactgtatgtcagacctgacaatctgttggtattctgtatgtcttgtggcattttctttctggagaaaacatgtttattaaatggaaatcactgaaacctgccatttccattccctgtgtctggatgcaggctctgcctgtctgcattgcctgcttctccctataacaccatatgctggaatatggatggcattatccagacaagtttcatatattttctattctcataacacccctatcaaggcaagttcagtaaggatattttcagaagaaaactctttgcccttgtgtattagagcaaaattataagcccacattaaactcaaggctttaaaatagaagcttaattttaatttaaaaccttgaataccatttgcatcctcaatgcaagtgtcaattgccagtgggattcctccagtccacagcacagccaccagagtgctcagaggcaggagcctccccagcccaggcactctggttcagggacacacacacacaccacacacacatacacccccacacacacacacacaaaccacactgatggattgaagaaccctgctgatagggcagaacctgttctaactgaccaaatactaagcctgtctttattctcctgagagtccctgatttgtagcaccataaatgcatgccttctacatactttgaaaagaactggaaaatgtttagcatattaaaaattaaagatatttatatgataaacaccataaatatttaagtatatataaataactgaacatatcttgatatcctgtatcaccatctatgactgcatagttgggcttattttattttattttattttattttatatttcttatgatgttagaacggaaccaggggctttcacatactggggaagcacagcatcaccaagccatgtctacagcctcataatgagtttttgacttttggggatgagccatccctggtttaattggaaaagcatatgccttctctttcttctcttggctccaagtctgtctttctgtctttcacacacacactcacacacacacacacacacacacacacacacacacacacacacacacacacatctctaaattgataactctcaaccttctgagacaagaggtggacacttatctttccaaaggcatcaaaccccatgtagcaatagaaggagagtggccctgagtaacaatagaaggagagtggccctgggtaacaatagaaggagagtggcctccttgaaatcgtacagttgcaggcttagtccccagttggtgaattgtttgagaaggattaggaggtgtgtccttgtagtagaaagtgtgtcactggaggtgggattttcctttttattcattcattctttttgtttttgtttttttggtgggttgtgggggtggggatgaggaggtttgagatagagtatcagtgagaaacagccctgggtatcccagaacttgctttgcagaccaggctggccttgaactcacaaagacctgcctgcctctctgcctcctaaatgctgggattaaaggcatgtgccaccatacctggtggggatgggttttatgctattgccagttcactaactttctctgcctctcatttgtggatcagatatgagctctcatctgctgccccagggatatcttgtctgttccatgctccccagatggtgaccatggactgagcctctgaaactgcaaggaatcccgagttaaatacttttatttataagtttccttggttaggatgtctcttcacagcagtagatcatttactaagacaccccacaaacagcatcatcctctcttcctcgttttactgggaaatgggacagggacaaaggggtgggacaggctgtgtctgtagcctggggttggaagtggcatgctgtacgcagttgcctttctgctcactgagccttgcatactgaggttcccgaacatggagaaaagcacatttgctcacagaggatgctgaaagatagccatgaacctggaaggcaaaccctgctgctctggccagggttctggatcacagtctcttttggatggcactctgaagagaaccaggtggaaaagccaacagctgaccttagccagatcatgtgaccttctcttcatccttgttggggtccaggagtcactccaccaaccacacaaacactggtctcagtcagacatggatgggttattgaatgtacaccctaagactggtcaattaggctgtagctcaggattcgggggctgtaacaacctgtaacatttctcaaggcctgcttataaaggaaaaaccacaatgaactcgtgcaggtgcaggaagtgctgcctggtggtttgctctgactcaagatattttggatagctagacagaacagttctagatgacctttattgtaattggtcctaagtggagcttatgcttattgaaattcttaagattaacaaacctcagaatataaagaacataacaggatatgtgataaacatgaccttgctctgagtcaagttatttatctatgtcattgagtggcaggcatattacaatgacaatatgaaatagctggcaggcatggaacaaaatgtctacaggtatgctgggggagggagcaggcctcaacaatcctaaccgtagggaatcttctgtcttatgtgtatttgtttttctttctatgttcagaacgctatccagggcacactttccttagctctttcctttttattgccttcttttatcgactcttatcttgccttcttttgttgcctttctcaattcccacaagctgtatccccaatgggtcttgtacctgaagtgtgtggatgccatgtagagaaaaagtgggttgggggtccccttcatgggtgacaaagccactgttttctagtctcctatttccctcaagggtcagtcatgtgcctggtctttataactgatagtaatgacgacaatgacaacaatgatggctgccatgggggctttttgtttgttttacctgattttgttatttctcctgtgcatttcctgtctacctggcactgtgctagggcgattcacatttcactcagctcagtgccgttattcccacattgcaggtggtgattagtctttgagaagttgggtgttccgttcaaattcttaagaactactcagtggccagaggtagaatttggtatttcttctgcccagacccttacctatgaccttagacatcccctctgttccatctacctggactgggctcaccaattaggtctctatggaagcagccctaatctgggtccagattacaaaccatgactacattgccacagtcttgtcactaggctttgctggcaaagtggatccctgctttgaatccttgtgtggctcattgctgtttcagcagttcagcaatgagtctggtgtgccaaaggcacttggtgcatccctagaaagaggtaaatggcctctcagatgggcaaagagtgcctaaagagggaccactgggcccgtgaaggtttccatagtcagggaatacaggaaaaagctgacagaactggagcttgggaactcgatgggggtgctctgtgaaagctgcacattcttttcaatccatgagtgtgtgcatatgtgtgcctgtgtctgtgcatgaatatgtgtgtgcatgcctgtgtgtacgtgtgtgtgtgtgtgtgtgtgtgtgcttgtgtgtgtgcatgcatgtgcatgtgtgcttgtgtgtgtatgcaagtgaaagccagagatcaatgttgggtggctttctcaatcactttacacctctcttttttgaggcagggtctgttttagtgataaaataccatgatcagaaacaacttggggaggaaagggttgatttcagctcgcatttccacatcacagtttgtcctccaaagcggtcagggcaggaccgaaaagcacctaagaccacctgccctgggcgggtactacccacaataggctgggccctcccacaccaatcactaagaagaggcttgcctacagcctgatctaattaatggaggcacaatctcaactgaggctccctgagatggctctagcctgcatcaagttgacaaacggagccagcacagggtctctgtgtgaaacagagctcactcatttagctgtactggttactgtggtctctcacagcagttacagatgtgtgtgccgccatgcgtgccgccatacttgactgtttcattggtgttggggcccaaactcaggtcctcctgattgcacagcaaaagctcttacctacctcgcatctccacagtcctttgtctcctgctgctttttgagacaaggtttcactgttcatctcagcctctccaatgctgacatcaggagtgcaccacctcactcagatctagttgtatttgtgtttgttcaaattcaacattattttttctttttccctttctttttctttctttcatttatttttcttcttttcctccttgtcatcgttgtcgtcgtcctcctcctcttcctcctcctcctcttactcctcttcctcttcctcctcctcctcttagctttttaactccttggtacagcaagctagggttacatgcaaatttggcaagatgccttcagtatcttcaagtcacattgaaaatattaaaataaaatttgttaaaatttgtttaatctttaatgaatttttagttttgattacagtaggtcttactgtggcattgctgcatacctgtagcattctgtttcttctaactcatcccagtgactcacctccattcgtgttgctctcctttctctcccaatttagtccctcctgctctcacagaactctatttcattactctctcccaggtcccctgtgtgtgttacagctcagataggaaaggtatcccagcagtcaggagccaaggaacaccacagagcacctctcagcaagcctcacaggagagaaaaacccaggaaggtggctgcctctgtcagtgagaagcaccagagaaccgaacagaagacagggtttatacagggtttctggtgagaggtgggggttgagagagtgcaggtatatgagctggatatgaggagggggacttgggaaggaggtagggatgggatggaggtggtactggtatagcttttcaaagtggcctggattggagggattatgtgacctcatcttcgtgtaagctcagggattggttggattcttttctgtatgacctggtcactctctgatcccatggagctggaaatagctattatggcccttagagaagctggggtgcagagaaggaggtagggccttgtctttggagcccctgggagtaggaatgggtgggggctggccattcaagtgtctctagggggtcaggtctagtaccagagcattttgggggtggagcctgtccactggaggtcttcagggatgaggcctccaaaaggaatctctgtatgccccactgcctgcccacaccaccagagtaggtgtgaatagccacagtccccccttctgccctccctctccacttctttctctctccccctttactctcatgttctacacacattcatgcacacaacacatacatatacataaatttaaatcgagattttgcatgcaagagaaagtgtggtattgatctgtcatttctctttttaaaattccatttctatctctttttctgtgaatgtcctaagtttaatgttttcaaatgttttattcacttttttgatatatcacccccattcctctcttaatttcttctagatggctccccactttccactcttcctaattttgtgctctgtctttttaaatagtttattgaagagacacttcaacttatgctgcccgtataccatgatatcttaaaataaatactttatattctttttaaatgtttatataaagaatgtcatttacttttaaagatcacatctaaatacttaatgaatattactgaaaaatgcaaaagagcttgttttaaacattacacaatatttactgttttcttgaacagaaatagtacagacttgagtgatatgccagtttgttgaagcctccagaagagaggaccatagatggggggatttacaacagcacaaatatattgcctcataatactgaaggttgaaggtctgacgtcacagtgttggtagtctggcttcctctgaggtctctgacctggccgtgtagatatttgtgttgctcctgtctgtgtctttacacaggttcttttcatgtgcctttatgcatctcaatttcttcctttaaaaacattaacagtcatattaggttaccctctttgtgacctcattttaaacaagtctcaatttgtgtcccaggctagcctgggtctcactcactccataatctagactgccttcagattatttatgatagtcctcctgcctcagcctcagagtacatgtgggagccatcatacctgactctttataactttttgttttgtttattttgttttctgaggtagggtttcatgcatcgcaggctgacttcaaactcactatgtagctcaggatggccttgaatttttaacccttccccttctattctagtgctggggttatagtgtgactcctgactcctatacctagctcttaatgtaagagcttattttcaaacatggctaccttctgaagtatggttcaaatttcaatatgtaaattctcagagggttctgttaatctcctagaaagtcaatacacttctcactcttctggtttgtctcttaaatagcttgcttcctatttctgactcacctgatgtgacatatgacttctgacatccccaggcacactcagacttcagtagagtggtacttattaatttccagttgcatctttgagtcactaaattgagcctaaccttctaccatacccagctataatcctgaggccacagatgggaactgggcataatgtaaccaggtggtgaaaaccatggtttgagggatatttttttcaaaatccaaaaatgagaacctcaaatgagaaagtattgcttctatacatgcaagtggacagggaaatatgaaagagaggcagtgtgtgtattttggctgctcagagtttggtggggccaggaagggagaatagagatgttctcataaatcccagagccagcaagtaagtccaagcttcaaaggaagatctgggtgaccaaatgcacaaagagctgaagcttgggaagggctgtgggaaacaaaacaaatgttggcgttggatggtttgagctcagagccaggaggggcctatggaaaggcatgatgggttatatgtaatgtgggcattgggccatgggaactagtccagaggctcttcaaatcaggttgaaccatgagggctgcattcaagggggctggatctggcaaaggcagtgggaacctgccatccatgtccagatcttcattccccagtactgactccagggacggtgcctctctatttgacttacctagtaaagaactatattttccaggaccccttagtcccaggactgagtttggagcagtgagaaatggaaaatccttgcatcttagagaccggtgggggtgtgctgctcacctgagtgcatctagaatcaggtgtactctccgtttgtcactgtatcatgatacactctccagagttcaggcttgagaactacacaattgactctctctctctctctctctctctctctctctctctctctctctctctctctctctctctctccctctttcctcctctcctttatataggcaactcttgctatttttcattgagctgcactcataagttatccttgacatgtaagccatgtgttggagatgtctggtggaccctggtgttctgtgactgtcccagcttctaaatgaagcagtatttccactcttctaatcagctttttgtcttcaagatgaggaaatccatttatcttacatagcatattaggcatactataaatcacctaggtctcatacactttgcttgtttctttcattgatttgcctggcttttcattcattcaacaaaaatactgggaccctatactgtgcaagcattgttctggatgtcaagaatgctgcaggtcatgccaaggtcacaaccaactcgctgtgttttgctttacaatttggtcaaattctaaagcctcaagtgctaagagttaagaatttggggaatttcacaggatcagtaaaagacattttgggttgtattttgtttttgtttttgtttttgttttgtttgtttgttttaagacagggtttctccatgtatccctggctgtcctgaaactcactctgtagatcaggctggcctcaaattcagagatctgcctgcctctgctttccgaggactgggattattggtgtgcaccaccactgcctagtgggaatagatgtcttgattaggatttctactgctgccatgaaacaccttgccccaaaagcaagttggcgaggaaggggtttatttagtttatacttcttcattgttgttcatcaccaaaggaagtcaggacagaaacccaaagatcctggaggcaggggctgatgcagaggccatggaggggtgctgtttactggtttgctccccatggcttgttcagcttgctttcttgtagatcttagcaccaccaacctaagaatgccaccacccaccacccagagaggctttttcctctctgatgactttagcttatgtcaagttgacacacaataccagccaggacagagattttcttgacaacttattgaatttccttgaaagctattcattaatttggcttttgttacttattttttggtctcctctggtaattggtttccttaaaagctgctccacttatctacatggtcaagtttattggtgtaaattgcacttcccaacattgagccacagtttaagaagtgacacagtgtcctttaacaaaacatgcccattttttttgttttcagagatcataaaacttttagcagaaaattctggagaaacattgagacctcaggataggcttgtgttttatatatatatatatatatatatatatatatatatatatatatatatatatatatatatatatgagccttggtttccctgtaagatttggccttgatgacagagcttcaacaaacacaatttcttatcttacaactctcttgaccctttggcccacctaatgactccagcttctcagaagtgccacagctgggccactgctgagcccatagtgtgagcctacaccccagagaggtggaggatcatctgccttcttggaacagtaggctttcagtgatggagggtccagtgtacttggggccagatatgggggctgcctataggattgtctgtagttgttagctaactcacaccaaggaactctgagtttcctgggatgctacagaccctgtgggatgcgggagtccctagccctgtgagaccttgatttaggttggtccatccttctggaaaaggaggggccacatgtgtgctgtctaggcagaaggcatgttcaggcattttctgacaatctcagtttatcgctctaagctatattttaataggtgccacaacaaagaaaggatccagtgttttctttccatggatcataaagcttttcataaaatctgaagaaacattgtgacctgggccatgggtgtgactctgggaagagaagctgctgttgactcttttgttcttatcactcctgtcatttatgggagagctttacaatttagagtacttattgttttgtcttgtttctcttgatctcatcaagtccttgagagttagattttatcatgatgcctaatttatagataagaaaatcatgacctgagatatcatcttcattgcttttctattgctgtgacaaaacactattacctacactgttagacaatcaagcttttaattgggctagagttcatgatggtggatcaaaagcatagtggcaggaagagctgggggtttatttatccccaggtaggagacatagagatctaactgggaatgtgggagtctttgaaatctcaaagcccacccccagtgatacacctcctccaacaaggccacacctcctaatacttcccaaacagttccaccaactggggaccaagtatttaaatatcaaggcctttctcattcaaaacaccatagatgtttaagcactcaagatggtcagatgaaaccagaaaccactccttgatgatgtcattttatttagaagaaacagtattctacattaagaattttttaaaagatttatttattatatgtaaatatactatagctgttttcagacacaccagaagagggcatcagatctcaatatggatggttgtgagccaccatgtggttgctgggatctgaactcaggaccttcggaagaacagtcagtgctcttaaccgctgagccatctcttcagccctacgttaagaatttttaaagagatttatttatttatgtacatgagcacactattgctgacatactaccagaagaaggcatcagatctaattacagatggttgtgagccatcatgtggttactgagaattgaattcatgacctctggaagagcagccagtgctcttaactgctgagtcatctttccagcttcttaacccaagttcctcctgtggaatggaccttaaattcaatctgcatccctgacagccatgtcattattccaccagcaggcacatttcccttacatgttgatatggcagcacgtatttttcataatcaagcaggacttatgactctctcccctcagcctacaggcactacaaaagctactcaacaatagaggatttcaagctcagttctagttttatttttttatgtcctacagccaaagtaggtacggtttttggcaacaagtagggtcttaacatctagttctagcttataaccaacagcagctgctatagaccttatggtttatgaagaccttggaccttcctgccaataactcacagagagctaacccaccttggcactgggatattcaataaaattatagcttctggactttattttttttttcctatccatagaaaatctgtttaagtcttttgactgctgttcttgttgttcttctacatgcctttaaccatctgtaaaatgctcaagggttaacattatattatatataagtatataatatgtaattaaagataaatattatatagttatataattatagataacattgtacaatatataaaagcctttctaccacagtgggcaggacctctgaggggccttcacaacccatcccaaataagtgccaaatggtttggggatttcatggctaggaggatactacaaaatgttaacaaggatcccgtccctcacctcaattgtctcctcagaagagcagtgttgggcacagggctgcagatccagcacaccctcatctaactctgtaacactcagccattctccatgagctgccctatgcccgtgtcttggcattgctgaagagctgccacacaccacccaacttgaccggctagacagtgtgggtatgtgcttttggttctccttaggggcaagagggagaggggctgtgctcttgcctgttattcccatggcttgagctaacctctccagtcttacatgctggagccagaacatttctgctgtctttccatcagccacatctggatgctaaaagggcccagagttgagtgaacaatctcagtgtactttttgcagggaaaaagtgtacacagttatcctggaggataccacctgggacaagctttgtcttttctacctgtactgttttatcctttaagacttccactgaagttttacgtaggttttaaacccttccagaagcccacaaacactggtcatttcctctatcccaggacttctggatccatatagatcttgccacatttgcttttgaccaacctactacttaaccctacttttggtgataggagggaggcactttttgttgttgttgggtattttttgctctctctctctctctctctctctctctctctctctctctctgttttttgagacagggtttctctgtgtagccttggctatcctgaaacacccctgtacactaggctggccttgaactcacagaatctgccttcttttgcctctgcctcccgagggctgggatcaaaggcatatgccatcactgcccagctgccccactcattcctgggatggattgtattagcactttaagaatctgatttacatgacagcctgagacatttgggtctagagaacctttctaactcataaacatgatgtttcatatttctgcaaagccacaaaagccccattatagtcccatgatcccttctaggttatatcctttccaaatgctcccgtgaataaagttctgccaggtccagtgaactgggcataacatatccagcctctaggttttatgtgtcccttctctatcctgatgcctaatactcattgagggcctagtgttcctaatggcataaacccattcattagtgacgaagttcccatgttttgcatcaagttatggagcctttgtcataagaagggatgagtagttcaaaggaatgacagactttcacttggcttttaaaggatcagcctagctgtgtgatcaaggttaggatgaagaggacacaggcaagctctgcccaggggggtaaatatgcagtccaggtgagggctaatggtagaggtggaaaatctctgcagcgtaatgggggaactcagcattgttttatttttttggcaatcccaaagttttctttgaacattactaggttgttgaacgacctatatctcaggatacactctgcagttacaactgggcaacatggacgtatataaggttcaacagataatgttcttgtacagttgtgtgtgtgtgtgtgtgtgtgtgtgtgtgtgtgtgtatgtatgtttgtgtgtgtgtttgtgtgtgtgcgtgtttgcttttccagtacaatcataggaactcaagtcagatacatttgagttctcaaccaccatttactatctgtgtggtcctggacctctcagagttatagcttcccatctgaaatggagactatgtaaggaataccaagctagcacattctgttggtctataatcattaccccataaatattagctagcatagatgtggctagaaccatgaatagagggccaaagaacagtttttacttttttttttttaaactgtagcaaactagagctgggaagacataccatttattccaacacttatttcccaggaaaggaatagaaaatgatagagtaaatatatgtggttagtgtcctctcactaggtgaagcatgcaggtctctggactttcagggtgcctgcctcttccatacatcactaccacagatcttaatgtgctcctaggtgagaatactaaaaacaatagcaagttatcaagattcaccctctgtatgcannnnnnnnnnnnnnnnnnnnnnnnnnnnnnnnnnnnnnnnnnnnnnnnnnnnnnnnnnnnnnnnnnnnnnnnnnnnnnnnnnnnnnnnnnnnnnnnnnnnnnnnnnnnnnnnnnnnnnnnnnnnnnnnnnnnnnnnnnnnnnnnnnnnnnnnnnnnnnnnnnnnnnnnnnnnnnnnnnnnnnnnnnnnnnnnnnnnnnnnnnnnnnnnnnnnnnnnnnnnnnnnnnnnnnnnnnnnnnnnnnnnnnnnnnnnnnnnnnnnnnnnnnnnnnnnnnnnnnnnnnnnnnnnnnnnnnnnnnnnnnnnnnnnnnnnnnnnnnnnnnnnnnnnnnnnnnnnnnnnnnnnnnnnnnnnnnnnnnnnnnnnnnnnnnnnnnnnnnnnnnnnnnnnnnnnnnnnnnnnnnnnnnnnnnnnnnnnnnnnnnnnnnnnnnnnnnnnnnnnnnnnnnnnnnnnnnnnnnnnnnnnnnnnnnnnnnnnnnnnnnnnnnnnnnnnnnnnnnnnnnnnnnnnnnnnnnnnnnnnnnnnnnnnnnnnnnnnnnnnnnnnnnnnnnnnnnnnnnnnnnnnnnnnnnnnnnnnnnnnnnnnnaaaactgaagaccacagagacgaatgttcttgtccctggtggagaagcatggtttggagacaggggcagactaggagccagaagcctcaacacagcatggggttcttcactggaaaaataaaaaggtcgaatctagcctttaaagtgccccttttagttttaaaatgtttatgtcccaagtgcttgatgatcctgggcttgaagaaatgctatttcagttcatcagcttgctatcttacttattataatcagacctcaagttaatgatcaactataagaaaggctttttgtaaaaccaaaagcaccaaatctgtgtggtgcagattcccagcatgttatttctggcttccatggcaaccctaacattgggtggcaatctcaaagtagttgaaggcagcagatggagacagagcatttgctaaactgctatgagcagcaaggaaacaaattgcttgcccaatagttttccttttgaataattactgtccccatgtgttgagggagttgaaactgaagccaagttaagtaggagtggaggaaacaaagcgttgtaccaaagtggaaagaggacaagttttcaaacaagttacgaacagccagccagggagtcactgtagagaggggtagagggatgggtattcagaagtgctaggtgaccagaaggaagtgaagacagtcagtttccacaaagcctggagaagtgaactgttctcaggagtactgagtgtgcttggttggattgttctgcctcaacaaattggagcctccacttggaatatcctgaggacagacaaggcattaagcagagaggtaactattgagaaagcagattgtactaggtaacaagcagaaagagattcactataggaagctgggcgcttgcacgatagtaggaggaaggggtgtgcagttcactacactaatacacatcgctctggatactgtcaccacaatccaccaggattctggtgagccatactactgtcactgtaatctacagggatgctggtgtgccgacactggaacaccaagtttgttgctgtagtgcactgtcttctacagtgttagcagagctagcctctatgtctcatcctttgtaaccgtctgtgtctaatagtttagctcattcttatcccaaactctagctgcagtggactctggtaattgtagtttttccctttaaacttctgtagtatttgaagacttggggagagatggtatttatgagttgatgttcaatcaatattgcttttgaaatttggaactaggtataggataagttgagaagccctcacagtcaacctgaagtttctccttcaattacctaagcaaggtagacttattcttgtggcagatatgcaactcctaacatcaggaatttaaaatagtttctctgggtttttgttttaggcttatcaatagggagctgagaatttaaacctgagaccttgttgaggaccttaaaggaccacacaggttggggacaggcatggtgagactgggttggaccaggcatgaagtctgggctaagtgtgtatctgaagggaggataaacacacacacacaaacacacacacacacaccacatacaccacacatacacacaccacacaaacttttctataactccatttcagctccttattagtgactatatgtgaccccagacagctctgtcatcctgcctctttaggatccagccttaccacccactttcggttccttgtatacctgggtagtacactctggtctggctttgagcctgcactcataactgccctaacctgtctactcaatcccaggcctaactcagtctatcatatcataaacttgtgattcatgctttttaaaaacctcccaaatatgccttctctgtgattcatcttggtgagactgttatatggtgtctttagaacctggtacaagagtacctgtgtttgtacagttgaaagtgtctctcttgctggtccagtgttcagagataggtaccctgtcatacaactcatctttactctggggaaaagacaccaggaccccatgccatgcagctgaacatatagggcctccttctcctcctggcttgaagatcttagctattctgcattactgttcacaggtctctctgccctgctcctggcttccatttgctgaactcttagagagcagaagaggctactgctcaaattcttacgtttgagtgcccctataggccagtgtctaaagtaggctttagacaactagttatgttatatgatgctctatagagagcagaagtcacatagcttgtttcccaggaagtgcttggcacatagttttatattagaaaatgtgtttttgtgtgtgtgtttatgtatgtatgtgtacatgaacatgcagatctgtggactctaatggaagatagtactatttctcaatttaagaaaaaaggaaaaaactgctcagagtgtttgagaataatactaagttgttttttttttctgtttttattctgtcagctcctattttttaaaaggatctaaagccaccgagtatgtatgtgtttgtttatactctatcaattacaggaaagtttgtgcagcaaactctgagaggacttgttgagcatttcttagtgaggttggagcaaactgctttaccttgcaaggaaatttcagttcattggaaaatatttctccagggctaaactagggcagccttttctttggctcccttgtaaagaaacccatccagggctctggaagccacagttgttgaagttcaaatggtgccgcctttcaactcctataatacttaccagaggagactggtgtgatgtggcattttttttcctttcccttttcctggctccttggtgcatgctccctgagggccttagagagctgtgttcctgaaggaatttataacagcaatgggaacaactgacatttgagctggtgtcaactaggatccatcagggggccccttgccagtgactctacttattaagcagtattgctatgcaaagatgactgacaactcattaaaatctttgtaaaataacagaaaaagaaacaagtatatttttgcaaggacgcagcctatatgtgtctgcaggttgaaaagaactcacccataaggggtttctcccaatacatttgtccttctgtacatttctttctgggttaaagtgcacacagagcaagctggacaatcccaagtcttcagctttggacttgggttccattggtatgtattaaaaagaacatacaggctattcagacagtgtgttgggtattcctgggggaagctatgatctaagtaagttcaatggtatcagctgcatgctctgcacaaagagaagaaaatttgaatgtctggcagaaaggggagccaagctattatattttccctttcttcagtcatgttctttttatttttaccaggcattccacttgggctatggagggatggccatgaaccatgagcattgtctcgtcttgatgtatgatgtgactttcattttcagtggtggaccaggactagagattgtgtggcttgtagttgcactgggttcatggaatactctctgagtctttcagtcagatgtcagttctctggagactgtgatcagcataggatcttctggtaaagcacatatgatggggcttggacagtagctcatcacactctgccttgctctatggtcactggtatgcttacttgtatcagtgagcactttgagtctccttaaactcagataagtgcatccaactacctggcatgtcttaggatgccaacgtccccacagcaccaggcactcacttttgcctttgatgccttcagttcaccaccttctatgtacacatctgaactaggctgtcatgcaatggcgatgattgcagtccactgtatgtcaaagtgtagtctgatttgtggggcttctgggccagcaaacatcatgtttatgggatgatactacacagcatgtgtcactacttaccctgggatgcacagcaggtaaatcttgtgacattggttctattttattgtctaattctcctcccagtctcaggtaccagttagtgtgctatctgctgactaggagggtaaggtaccttttctgtgggacatttttctgttgaaaggaaactacatgctaggttacctactgcagtgaaacagtggttgtaaatgcaaagagtagataggttttcaatttctttccaccatttcctatcaaccccacgtccatggacttgctagagaacctctaagtctcatctgccctcccttccttctcacattccttcctgtgcagtagtgggtctaccttctttactgtctgaatcaaactggagactatggcatagctgtcacatacatgattcagcaatggaacgatatttgcaccaggagacatgagggaatccaggatacagtgtcaccatatttctaagacctctcctggtaatggagacacaggcatggagtactctgctgcaatcccctcttctaggcacttggcaaatggcctctcatgaccacatgtctctagagaccgagttctcaggcttgtgcccaagaaccacctggaacgagtgctgattcctcgcctgtacaggatctgactcattaacttcaggactcagcatttttaatacatttgccaagtgtttctgacatcaccagaccactagggatctctgtcatggctggctcactgaacctccagatcagcttttccatccatccaagctcatggaggactgcctatacttctttttttgcttcctttccactccttacacgtacttatgcacaccaaagagaataagcaaagattcagataagagcatccaactatgtggcactttgctgagtcccaggattcatagaagatggtgcatgtagctaaatagctttatacataaaacatagagagaggattttagtagaggtaaacatgggatatgaaagagggtcgtttacatcaatggaggtacactgggagaagtgtaaaaacaagagaccccatggcttagagcatcaatagcagagtggaagctcgtgaagagagcctcctgcaaaagttagtgaccttgttgctagtgaccctgggatggtacaaccataatgactttattgtcagtgaccttgggatggttgcattggtaaccactccctgaggcttcattgtcctgggcacttcatagctgtcagaccaacttttttgactcagatcaaaatgtacccagatactcattcatgagaagttctgatatgaagagaagactaaggtcccttgagttaggagaggccaggagggccgtagatgagatagttaaaatactaatattaggaggagtctaatgatgcgctggcaacactggttgggaaatgttgacgtgtggtgttgatgagaatactatagctaaaatttgacattaaagccaaggaactggggctgtaaattgaggctgtggtatagatttacctgccattctggtcccaattttaatctgtaaccagatgtcaatctggaagtccctctccttgggattcataacttgatatttgaaccccatgtaaagtgtgcaacactaacttctcttaggtttcatcatattagttttgactcattattctagaaatacctcatgacctcatgtttcctcccaacaatgagcctagagagaccacaagagctgtttttccccttgactttggagaagtacttagaaagtattacagaggacaaaaggctttgtcaatgagtccaagagatgtcctgagcccagtaagcagcggagggtgttgtcctgagaccctgagtcagggttcagtctcttcccagcagtacttttggaagatgtgaatggaagtgatggagccagagaaagccattgctcatcagctttgtacagtgtctaatgtgaggtaatgcagcagctggctgctgattagcaagggagttggagaaacaagagttgattacaggccttccaggcctggccagggtccaggcactctattaaagtgcctaaatatgtgggaattacaggtcaagtgacactggggacaagagccaaagatgagacaaattattcctgatgtatcctctttgccatctgtaagccctgcaagtcaatcacagtcttgaggcacatggggacagaatctcacttggcatgtgctgtcccatgggcggggactatcacagcatcatttgcattgtggtctttgctctaggcactgcccacctctcttgtgtcccatagaaaatcttttgccgggcagtggtggcacatgcctttaatcccagcacttgggaagcagaggcaggcggatctctgagttcaaggccagcctggtctacaaagtgagttccaggatagccagggctacacagggaaaccctgtcttgaaaaaaacaaaaatgagagaaagaaagaaagaaagaaagaaagaaagaaagaaagaaagaaagaaagaaagaaagaaagaaagaaagaaagaaagaaagaaagaaaagaaagaaaggaaggaaggaagaggaaggaaggaaggaaggaaggaaggaaggaaggaaggaaggaaggaaggaaggaagaaaaaaaagaaaaatcttttgaggtcctttttttctctgtttctctccagtgttctagtcacattttaaatcatgtcccactggttaactctattaacaagagcagttgtaactgtttgctcaccattcctgtgcccagcattactctggccatgaaattagtgagctccatattcacacattattatcctgagctcagccattagcgtctcttatctccatcccgtaactgcactaccaggctcatacttacacttcgataatgctgaggtcttatcttcactttgtgtccattgatcttgatgtctccttcgcccttcactttcccagttgcctggcctctcagatttaatgctgtcaacctttgtcccttcctgatccacccgataaccctgttatatccagcttttgcctaacttgccccaggtcagagtagctgcaacagaacaccctaatgtgttcactggtctcacacatcacaattctttcttcaagtctgcctttgggctgtttaagatcactctctagttcttaactagcagccagaaccccagaaactattaccttgtttttttactcttgtatcattaaaatcttcagttttctcagtgcccacaagccatctgtttgtggagctttgctagggagtgatataaaacctctggtctctgttttccattctcttagcacttgtctcttgtcctggctacattcctcctagtccccacagtcactgcaagaccagtggtctgtctatctcagtgtcttctccttcagtctcctcagatctcatacctgctgagccctcagcaagccttgccaaggaagtgtggatatgagttaaccagcaggcccaggctcttgttgtgatgaaggccagggttgtttgtttgtttgtttgttttcttttgtttttatcatttgggtaagttaaataagtatttagcaagggaaaagcacttggtgaggtacaggaaagcttgggccatgttccagaaaagaaaagaactgacccccgagagcagaaagagtccttgtgtaccttgaggattgtgcgaatgcaaggtgaagaagatggggtgagcatgcttggtggtgaatcttggttcctcacacttgtacagtcagacagagggttcaacccaacatctctgcttccagacagaaaggaaactgtaagcaggtttggactctctagagccatgtcctcatctgtaatgtggaaacagaaactgctcagttcctaaggtgactagggaataaataggccagcatatggaaaacattccaaacaaggttgggcagctcagtgtgatctacaacttcctgcagtattctctttgaatcttacaagtttcttgccctgttttacagaagaaaagatcaatgattgggtgggggagagggctccgtccctggaaacttaaaacaaacaatcaaaaaactggtcacagtctcatgcacttttaatctagtgctggggtagcagaggtaggtagatcttctggtcttactggctgacaagtctagcttactttgtgagagagacccatctcaaaacaaagcacaagcaaacatgaaggtagacgatactgaggaataacagccaagattgtccaacataaaagcatggacacacacacacacacacacacactcacaagagactgagggtcaaagaacttacagagatggtcacgattattcgggcagaaactgacagaggttggttgtgtactgagatcatcacaccttattgctgtttgcctgagaatccccaagtcccctccagataaaattactttatcctcattgtagagactcacatccttccctattccaaaatgccctggcttccccagcaggatggcaccaaatgtttaccatgctgccacttaaccagttccagcattgacaaatcttcagcccaaggagaggaaatagttgtgagattgcacactgtcacccggaagggcagaaatgttctcaaaattctcctggcccagattctctttttctgaaagagggcaagagactatgttctcaaagccaggactttgagtccagatgacaagattggaagtgcagttgacagagtccagatcattgcttcatggtgagaggggatgacattttattatgtgctcacgaatccttatccaagtgtggctgaaagtcctgtcatgaggggccaagaggaagatcgctgtgtgttctctccccaggctgaggagaaggtgcatgcttcctcagcaccagtaattagcatgaggggatccctcagcggagagtccagttttctggaaatgtctcccaactggccatcgtggagaagctgcaggtttttacaggaattattttggtgttctcaagcatttgcaaagctcatattgctgtgttgtagagcgcatccttgaggatgtgttgagaggactttgaaatgatagggaagctaccattatcatgccagcctgacaacagtaagctcaagactttgctgtgggagagcccttttcataagcttgctgttctttaaagtgggtgacttgcctctacatggggtcctttggcttacattttattagtctggagtccatgaactgagagttcagccctgatgatgctgtgtataagtgtaggaactaaagttatgccacaccaacaagaggcacccatgaactctctggctttaaggttgctgtggcttccttcacctgattgccctgactcagtttcttcctctgaagccttattttaccacctgaaatttcacttaattctacagatgttgatgtggtagaatactcattgtatttccaccacataagcatgcacatgcatgtacacacgttcacacagacaagtgcatgcacacacatacccatgcatgcctacacacacacacacatatgtgcacacacaggcacatgcatgtacacccatgcacataagcatatacacacacatgcatatgtacacacacgcacatgcatgcacacaaacacatttctgagtcccaccttgtggaactcacagtgaggcagtgaagtcaggacataccagaattctttgtatttccagagatttgctttctaacattctcagatccctggatcgggaacagcaaagtcaccattcaacttgttagaaaggcaagttttcatctgtctctccaaactcagagtctagcagctctagggatgcagctcactgctttgacctttaacaaatgctgtaggaaaccagggtgcatgcttagacttgagaaccactgagctagccttcaagggacacactgagcaggtctgagttcgtaagggtagactgctacaacttgatttcagctcagagctacaactcttgtggaacttcttaacaatatttgtgaagcattgtgatatttttcttgtgtcccaagcattgtggaaacaacccatttgttttgatgggaactaattcagattagcacacaattccacatggaacttccagaattttcttcaaattgttgatgctcattgggatgttgatgccatgagtaagactcacaataaaaatctcagtttgagcaaaagcctctgctaccaaatgtctctaggggatgagaattttcagtgatttagtcctttgtggggtctccttcctttgaaccattaaagttcttgtctatggtgaggtcaaccagatcccctgatctcctcagcaagtagacaccactggcccattatcccagaaattagctcagccttacttagaaggggcagacaggtgtggcttctggaggggaactgacctggcccatcctgacacactctagtcctgctctcgcccatcctcaagcttagtatgagagctaaggagaaaggagaaaaagaacttgggagaggaggtaggcagaagagagtctacatgcttgcttatgtgactattacctgtcggccccttgctcatagctgccctgagagctgggaattagtggtgtctctgtgtgttttctcttttcctgaattatgaaagattagtaaactcttcagcacctccactttctcacctatgcaatggtacaattttagcacttttctccgtagcttgttctgaaaatggacttaggtacctatgatgaattcactgtgaaaaggagattttagaacatcttgtgaatgtgggggcctctctcttgagaaattccccttatatgtacctaggtcccaggattggatttgctgttagatggggatacgttatatgtggcttcctgccaggctactggtactgggggcacccccttcttctctgactgttgggcttgtatgggtgccatggagaggtgtgtatgccagctctacatgacaagtcaccccttggcaagctggcctgggcaggatggcttcccagactttttccacttcccatcctaatgactggcttcactgcttaatcgttggctttctgtctcattcttgcagctgtggtggttgggatttagggcaaggacttgggatcttttttctaatccctttcaaatcctgcttgagttgcaaagtccagggaggacatagagaagaagggagggggaggatcactctgcctaaaggtagtgtattggtgtgctttcttctgagctaaggaaataggtgcagctaggtaattttattatgaaaggctggggctgggagatggctcaattggagaaaagcttgctgaaaatgcataagaagctgtttggactcccagcacccacatcaaagctgggcatagctgtacatgtctataaccctaccatgagcagcaagggagacaggtggatccctggagttggccggccagccagtctacacaactggctgagggaaagacctgcctcaaaaagatagagagtaatagtgaaggacctagacatccggcttccacgcccacccatacatacagaaacccaaatacacgcacatgcataaaatacatatagagtgggtgttttttacttgatattctgtatcaagctggaaggctgtatgtggtaatgactttttgctgttaggtaccccaggaggcacaaggcattgtgggataaggaagtgtaagtatagattgtgtctcttctggcctctgccactcttcttaaaaagtcaccagaactcagcaacagaggctctgttccattcagtcctgattcttagcaagtatccaacctctggatgccatagctacattaaacttccattctccccgaacttcacaataggaattggatctggctacacgaccctctgaggaatgttctcaaaccctatccaaacagtagcaggttgtcaccttcatcggtcaggaattccacagtggagtatattatctatctggaacccctgcaagactcaaactcagttgatttttttttctatgctgagtatttaactcggggcctcataaatgcccggcatgtgctctaccactgaactgcaggcatctgaaaactctgattcagttaattgcgatcgtgcaacttccctgcaagagatgttatgcaatatggtgctaagacatcatgccatctgtgacctgtgtacagatttctgagtctgacttgaaaagttttttatagttggcttcagaatattctcagctaactccacccagtagttcttagtattctatgtgttttagagccttttacttagttttccaccacatttatcctgtctaggactttgttcatgaaccactctccatatattctttcaaccaaacgatctgtattcacaaggcagcttgtgtctcatctctttgacctcagcctctgagtgcactctccctcattttttctctctccttccttccctcccttgtttcccctcccctccctcttagaaaaaaaaagacgtatttatttttactctatgtgtgttttgactgcatggatgtctgtgaatctcatgcatgcattggcccttggagaccagagagattgtcagattcccatagacctggaattacagacagttgctggccactatgtgagtactaggaattaaacctaggtcttatgcaagaacagccagtattcttcactgctcctgtcctgctgcagctttttaaaagtctgttgtgaaaacttggtttaacccttggtattcattttcttagctctgtcttccgagatagaatgcaagccatttgatattggaccctcttaagcatcttttcttcagtgccttgccaaacttacacaccatgccacaaataataaaatacatttgattctgataaaggttttgactgaaactgcattgactttatagatttatcttgcaaaaagaaacactgtgtgtagtctagggtcatgatcatctaatgtacacagacatgccgagaactttcctgaataagagtaaacctgaatttgggaggttctaaagatgttcctggttcttaggattttccacaagagacaattcaaattggatcctttcttcttaccattatttttgcccagcttgtcaaaaacttacacaaacctggggagagagaaacccaattgaaaagtcatctccatcagactggcctgtggacatgtctgtggggacatgattgtgagtgctgatgatgtagaaggacccaacccacttgtgttgctgggcagtatagcccaagctgtacaagaaaagtagccgagaaaggcaggagaagcaagccaataggtcgtgtttctctacagtctctgcgtgactttccctgatgttgaactataacctataagtcaataaaccctttcttctccattgaaagaaaaagtatcagctcaggaccctcaagaccaagttctcaagacaaaggagatttctttgccacagagggcagggataagagacaaagacaggagatagaggatgagggagaagggaagggaacaagggaaaggggagaaagaggtaagggagaaggggcaggggtatttgtcccagagtgagacaaaggactgcttctggatagagaagagacagatgtggcacttagcaagatggcacttttcccctaacaaagggaaaccttcatgttaggatgaggtattgaagtttaattgagcatgataattaggcagccaaagaaggcttttgattgttgggcttcagtactttggtaggtggaccttagtagtcaacctcaggaggaggatcaaataaaggaataaaccttgggagctagcattaggaatgtaatctaacagcttttagcaaggcagagggaatgaggaagaaggatgaagccttccagcaccgtgctggccatgctcgatggctacacttgccaaactcaccatgcttgccactctcctcattcatgagctagtcagagttggccctttacccatgttactttgggggcagtttttgttttggtttgttttgttttggtttggtttggtttggtttggtttggtttggtttttcaaatcagggtttctttgtgtagccttggctagacttggaactagctcagtagactaaactagccttgaactcacagagatctgcctgtctctgctggtattaaagtcatccatcaccaccacttgacctgggccagtattttattacagcaacagaagggcaaatctgaacacgccttcctctgatccttgtgacctctgctctttccccagagagttcctgtgagaataagcgggcagatctggtgttcatcattgacagctcccgaagtgtcaacacctatgactatgcaaaggtcaaggagttcattctggatatcctgcagttcttggacatcggtcctgatgttacccgagtaggtctgctccaatatggcagcacggtcaagaacgagttctccctgaagacctttaagaggaagtctgaggtggagagggctgtcaagagaatgaggcatctatccactggcaccatgacagggcttgccatccaatatgccctcaacattgccttctcagaagcagagggggccaggcccttgcgggaaaatgtgccacgcatcataatgattgtgactgatgggaggcctcaggactcggtggctgaggtagctgccaaggcccggaacacaggcatcctgatctttgccatcggtgtcggtcaggtggacctgaatacactaaaggccattgggagtgagccccacaaggaccatgtcttcctggtggccaatttcagccagattgagtccttgacctcagtgttccagaacaaactgtgcagtaagtctgtgcctcatttgtctttaaggccgccttcattctgtgctcaggtccatgggcaaagagagatgcaccattctttggaggattatacatatattaagcatataattacacaaatacaaaagtagccttaattgttaacagtgtaatggaagaagaattcaggacagaaaacctcagggtctaatctaggccatgttgtttataaagactttcctagggctggtgagatggctcagtgggtaagagcactgactgctcttccaaaggtcctgagttcaaatcccagcaaccacatggtggctcacaaccacctataatgaaatctgatgacctattctggtgcatctgaagtcagctacagtgcacttatatataataaataaacaaatctttttaaaaaagactttactagaggaaaaggtgtgtgtgtgtgcgcgcgcgcgtgtgtgtgtgtgtgtgtgtgtgtgtgtgtgtttgtgtgtgtgtgtgtgtgtgtaggtgcatgcatgccacagctgcttatgtatgaaagtctgaggactatttgcaggagttggttctctgtaccctatgggtcattggaatttaaacttagatcatcaggcttaatgacgggaccctttacttgatagctccaaagggctttgaaatgcaaagacagattgagtaaggacagaataaaggtatcctccaacatgtttagctgacacattggcattcccaaaattggaactcgcaagttggagtaggaataggagcagaaggtggaaatcataatagcttccccatgtgtgtggaagaccagggaatttttgctgcaggatgtttgtttactgacaaagaggctcaatacaaagcaaggactgtgagggctttgaaggctaattcttagaatatgacaaactgcaaaccttatgatatagtgagtgaaaaacaagatgtacttaaaaacattttaaaatttattataataattattattacttattcactttacatcctattcattgtttccctcctggttaccccctcccataaccctacccctattccttctccccttctcctctgagcacatgggggtcttcctggggatccctcccatcctggtatatcaaattcctataaggctaggcacatcctctcccactgaggccagacaaggtagcccagctagtagaacatatgccatgtaaaggcaacagcttttgggatagcccaggttccagttgtttgggactcacatgcggaccaagctgtatgtctgctacatatgtgcagggaggcctaggtccagcccatgtatgatcttgggttggtggttcagtctcagagagccccaagggaccaggttagttgaccctgttggtcttcctatggagttcttatctctttagaggccaaaaccgttcctcctgtttttccatgatagtacctaagcttcattcactgtttagctgcgggtgtctgtctctgtctaagtcagctgataggtggagcatctcagaggaagccccccctcaaaattaaaagtaatttaatttcttttcaagataaggcttctctgtatagccttggctgtcctggaactcacgctgtagaccagcctcaaactcacagagatctgcctgcctttgccccccaattgttgggattgaaggtgtgtgctaccactgaccagcttaatttcttaaattcttttgacacaaagtctcaataatccagattgttttcaaactctctgtagtggggaataaccttgaattttattattgttgttattattatgttccttctaactcccacatgccaggattacaggcgtgtaccaccgcaatgaggatgaagtctagagcctcatcactccggacaggcactctcctgactgggctacactcccagccccaagtgtacttttgatgtatcactaaaaaacaaaaggaaaaaaaaaacttgcaaaccttgcaaaaactaacttaagcaaagactccattttcttttgactccagagtcaaatgatttacttaagaaatcaatgacatgaaagaaaaacaacctttttttctgagcagggtcagttggaaaccattcagaggcaccatttccctagcatcacagagaggcttcgttattgtggtgcaccgtggcctaagtcaactggaaaacttcaatcagtagaacacactgcaaacattttaaaggtttatgactttaaatgacttcagcagaatttatgttccccctttcctggaaatattaaaaaaaagaaatcggttccgtaaccctcttgtcagcttcttcgtgtgtattggatggttttaatggaggagtgccttttataagcactctgcagtcatcagcaaatggaaagataatatgataaggcagaagagctctatgacatgaatgacccccatgtgacttgggctcagagaaccttttttctctgtgtgctttagacacgcagcaaatttaaaaggctgtttggacaccccccaccccaggctccccatcatctttgtttaatctggaagctttaagaaaacactggtattatctcattcctttgtgcagcctgagaatcccctgggactcttttcatgcactctgctgaagtgcagctgagctcccggccttgcaccaccaggctctgctgagcagcttcatcagctctcttgaaaggttgaggaggccctagagcctctttatcaaccacatgctgaatacggcaatactaatgcccattaagcactttccccgtacacctgatgcttgtgaaaccaggctacatggtactgtaccagtatgtctgtgtgagggtgtcaaatcccctgggactggaattacagacagttgtgagatgccacatggatgctggggtttgaaccctgatcctttggaagagcagtcagtgttcttaaccactgagccatctctccaaccctggccttacaggttaacaaactttgctgattccaaagttcctgttctccttcacaggccaagaattataaattcctgtcttaaggtgaactatttgctaagggcagcctgcacagggaaatggctctgctagtgccattcatctgaagaaggtaaacctggtaagtgacccctgtgttgtagaactaggacaggactggctgtgtggtgctgggtgagagactggcagtgtgaccgactatgtgacaggatgagcttggtccttgtaaggtagggcttttataagctggtggatgtacagacaggtttaaataacctgtgggccccattcagtgtgtgtgcattactacagtcagatactctccggatgcacatgtgaggcaactggctttacttctcatctgcagtctgacaaccagacacagccatgagcatcttctgaactgcaaatgacatcttcaggagcaagtttcatttgctcctgaaacattgaactgcaccctgatggccataggcggtcatgtctcatgttaggtacattctgtgcattgttccatttaatactaaagctgtattcccagacaggtattcttgtggtgcccaagtacaaaagtagaaactgaggcttggagaaaaataaatagttcaaacaccagcttccgagattcagagcctaagtacttcctctccacgcatgagcctcaggactgttggaaagatgttctccttatagaagaatgggtgtggacatggtgtgtccttcatagcccaggatagctttccagacgaggacctcatcccaaagagcacctgggtctgcctgggggctccaagaaagcctttaaagtgaaacaataagattaatcactaacagttgctgttatcaatatatccatgtggctaagactgacagaacactcccgtaatctatacacttgaggttgaggggccaaggagatgtctcagagggtaaagacattgacatagaagcctgataccctgagatccatccccataactcacagaaaaagctggaggcagtggtgagatgaaaagccaagactggagaactgacaagaagttccagcaccagatagcctgaagtacacacagcacagcagtgataagctggtcagggaggatccactcctaaatgctactgtgacctccaaaggacacgttggtgtgtgtgtgtgtgtgtgtgtgtgtgtgtgtgtgtgtgatgagagagagagagagagagagagagagagagacagagacagagacagagacagagagacagacagagacagacagagacagagacagacagagagaaagacaaagagagtgagcatgagtgagcactcatacacagaggcaaaataaaaagacaaatgtttttaaagaggctgaagtaggaggatctagagtttcaagttagcctagtctatataggaagaccctggccaacctgagctacaaaagagaaacctatctcaaaggtgtgcatatgtgtgcctgagtgtgtgtgcatgctccatggggctctcagcagaagtaaaatcattttattaacacaacaaacatgagaaataagtattcttaaaactcaggaaaaaatgaaagacttaaagacttctctgccttgcccagggtcagtcagctctaggtgagtgaagggtagccaggtgttctggccccaaagctacagctaaaccacaatnnnnnnnnnnnnnnnnnnnnnnnnnnnnnnnnnnnnnnnnnnnnnnnnnnnnnnnnnnnnnnnnnnnnnnnnnnnnnnnnnnnnnnnnnnnnnnnnnnnnnnnnnnnnnnnnnnnnnnnnnnnnnnnnnnnnnnnnnnnnnnnnnnnnnnnnnnnnnnnnnnnnnnnnnnnnnnnnnnnnnnnnnnnnnnnnnnnnnnnnnnnnnnnnnnnnnnnnnnnnnnnnnnnnnnnnnnnnnnnnnnnnnnnnnnnnnnnnnnnnnnnnnnnnnnnnnnnnnnnnnnnnnnnnnnnnnnnnnnnnnnnnnnnnnnnnnnnnnnnnnnnnnnnnnnnnnnnnnnnnnnnnnnnnnnnnnnnnnnnnnnnnnnnnnnnnnnnnnnnnnnnnnnnnnnnnnnnnnnnnnnnnnnnnnnnnnnnnnnnnnnnnnnnnnnnnnnnnnnnnnnnnnnnnnnnnnnnnnnnnntcattttattaacacaacaaacatgagaaataagtattcttaaaactcaggaaaaaaatgaaagacttaaagacttctctgccttgcccagggtcagtcagctctaggtgagtgaagggtagccaggtgttctggccccaaagctacagctaaaccacaatgtgctcagatgggaagaggagtagtgttctctggtcagggctgtgtaaggagggtgatcaccatgctccgagctcagaatgatgatatttaaagtctgttttatctcgatctctgtctgtctgtctgtctgtcatctgtttatcatctatctatctgtctgtctgtctgtctgtctgtctgtctgtctatctatctatctatctatccatctatccttctacatgccagtcctggtcctttcactggtttcactccccaattagggcagtgaatcacagtttgaaagtgatgttgaaacccaacaaaagaccagactcctgtgaaccaaggtcctgtgtgcaagctgaccaaaccccacacatcctggcatccatttttgttgcccaggagcagaaaacactgactctcaaggttgaaaactgcaagtcttaaggttaaataaaagtctgtgttttgaaatctggtgactcagcatagcttggctagggctgtgtttgcttaactctatcgtgtctgttttatcagcccagagcaaagctgttcctaccctaacagcccctttatacttaggcacagcttaaggcccaaatcgtgttctgaaggcactcctcgcgtctgggaaaagtctacattgatttcacccctttgaggctctattgtgaaacagggaggcaaacctacatagatgttggcttatatattctgcgattgttcccatcgagaccctcagccagccacacagaacagaatgttcatcttatcattcatacatttttaaaaaaaaaacagatttctcaagcaaacttgagtgtggtggtgcatacctacagtcccagcatgcagggggctgaggcagaaggatgataaattttaggccagtccaggctacataggaaaactcttttacaaatcaaaacaagcgaccccacttcaaaaaaatagctacttattctttcctttcctccccacctcccttctctctctatctctgtgtctctgtctctgtgtctctctgtctctctgtctctctctctctctctctgggctctctgggctctctctgtctctctctctctctctctctcaaatatatacgtatttgagataggacctcattacataggcctggcttgtaagtcacagatctgcctgcctctaacttctaaatgctgagattgggcatgcacacacacacacacacacacacacacacacacacacacacacacacacattcttctcttaggccagtctaggttaaatgagtcattttcttaaaaaaaaaatttcaaccaggatggggccaatgagagggatataaagtgaatgagtaatatatgagtaattctaaacaccacaacatttaataataaatttattaaattaaaaaaatccagtcccaggggctagagagatggctcagcggttaagagcactgactgctcttctaaaggtcttgagttcaaatcccagcaaccacatggtagctcacaaccatccataatgaaatctgatgcccttttctggagtgtctaaagacagctacagtgtacttacatataataaataaataaatcttttttaaaaaatccagtcccaatactgacttagactagtgacttattatttcttctgagtaaaaaaccttgctcgagcttaaacctggtactttctgaggaatggagctaattggctcacacagttcttcagctcagtgaaggaggcagaatgctgcttccactttaacagcacagcaaaggtgagcaggcaagagacccagatgtacgcaggggcactcagccataggactccatagatgtacagtttattctgttctgtaaaatatttgaggttcttttggttgaaagtgatggaaactcaacttgacttgggtgttgtggctaattacactggagccaatcttggaggaataactgtatgccttctggaaaaatgcatttgagcatgctcattgcatctgtgtaaagatgaaagactggaaactgtccccatgctgaccaacaggtaaatgtctaagtaggttgagacaaatggatgaagacatcagtaggcttcagccagagccaggtaattaaattcaatcaaaaaggttagttaagttagagtttacatgtgagattaaatccaagatagaattgttttacattgttcaatgtcattttgctccatgaagtcactgtaaacactgaattaaagcacatggaatcatttcctttatacaaaatacacaggcaagatcagttgcaatgagcctctggtaatctgacactttcgtagcgggtcaatatataatctattcagagacaacaaaattaatatgtattgctgactcactaaccttgagctcatggccatcaaagaccctaaatcattctaggatggaacatgtcttaatatattcattttcctaagagggctttatcatagctttttttttttttttttacttagtgggtcatttcaaacaggaaaattacctacaaaacccgcaaaaatgtcaaaaacatagtgctgcctggactatgaaagcaacaatttgctatcatatgaagtagaagattaaaggaagcaatgctgccttgctcaacacatccaagggcatcgagaccaggagacaaactactgttacctcttagtacctcaggaagactgggaaagcgccgtatggctctggggttacaagtacagctcagtgaccaggagagtctacaaatatggaatctatcagtaatgaggatcaagcttatatggcctctcattttaatatctttgaaattagagcacattttggatcctgtaaaatacagtgcttgtgtcagtacagatagaatttgtgattaatgttgaatgaaaattgaactggatggttagacagacagacatatcaatgattgggtatacaaagagacaatattcccaaatgtaaaataaatgatattataatggagagatggctcagcagttagaaaactggttgctcttccagaggaacttggttcacttcccagcactctgtgctcaatcattgtaactccagttctagaggactggatgccctcgtctggccttctcaggcaccaggcatgcatgtggtgcacagatatacatgtagtcaaaacacatagaataaaaataaataaataaaaatcaaacagcatgatactttccttttgctgtgaaatggttaataggtattaagccctccccagctcttgatcaccattccggcctctttatcaggttaactcagttaactctcacaaggccctgatgaggttagtgtaatgtttagcttcacttaacgcaaagatattaaaatttctcaggatcacaaaaaggtcaactacttcagcctgtagtataaatggtaaggttaaacctgcaacttcccttatgtgatctgtgtcctaacaggagttatgagctcagaacaataagttctaaattgtgctgttataaaataaaacagtttcattcccctatctcatatattgctgtcttagagtttctattgttgtgataaaacaccatgaccaaaagcagcctacacctctcaggtcaagaatcatcactgaggggtgtcaaggctggaacctggaggcaggaaggaagcaggggccatgaagcaatgatgcttactggcttgttcctcgtcttgtctcctttcctttcctttcctttcctttcctttccnnnnnnnnnnnnnnnnnnnncatctatccttctacatgccagtcctggtcctttcactggtttcactccccaattagggcagtgaatcacagtttgaaagtgatgttgaaacccaacaaaagaccagactcctgtgaaccaaggtcctgtgtgcaagctgaccaaaccccacacatcctggcatccatttttgttgcccaggagcagaaaacactgactatcaaggttgaaaactgcaagtcttaaggttaaataaaagtctgtgttttgaaatctggtgactcagcatagcttggctagggctgtgtttgcttaactctatcgtgtctgttttatcagcccagagcaaagctgttcctaccctaacagcccctttatacttaggcacagcttaaggcccaaatcgtgttctgaaggcactcctcgcgtctgggcaaagtctacattgatttcacccctttgaggctctattgtgaaacagggaggcaaacctacatagatgttggcttatatattctgcgattgttcccatcgagaccctcagccagccacacagaacagaatgttcatcttatcattcatacatttttaaaaaaaaaacagatttctcaagcaaacttgagtgtggtggtgcatacctacagtcccagcatgcagggggctgaggcagaaggatgataaattttaggccagtccaggctacataggaaaactcttttacaaatcaaaacaagcgaccccacttcaaaaaaatagctacttattctttcctttcctccccacctcccttctctctctatctctgtgtctctgtctctgtgtctctctgtctctctgtctctctgtctctctctctgtctctctgtctctctctgtctctctctctctctctctcaaatatatacgtatttgagataggacctcattacataggcctggcttgtaagtcacagatctgcctgcctctaacttctaaatgctgagattgggcatgcacacacacacacacacacacacacacacacacacacacacacacacacattcttctcttaggccagtctaggttaaatgagtcattttcttaaaaaaaaaatttcaaccaggatggggccaatgagagggatataaagtgaatgagtaatatatgagtaattctaaacaccacaacatttaataataaatttattaaattaaaaaaatnnnnnnnnnnnnnnnnnnnnactctaacttgtgttagagtcattggctgcaacattccttacttaaatgcagagacgtgtatatgcaaaagtagtccatcagtagctgagtttccctacctactggctaaacacaggattgctcttacatttctcttttattgtataagcttcagaaagctattttctcacttggacatcttttatttatgagaacacttatataatgtgttctgttcacactgatgcctgttaattttaaatatgctcaacttgtactagattgattaaagtcataaattgagatgttaaaaaacagcaagaattgcaagagctccaaatagatttaataagaacctatgtggccgggcggtggtggcacatgcctttaatcccagcacttgggaggcagaggcaggcagatttctgagttcgaggccagcctggtctacaaagtgagttccaggacagccagggctacacagagaaaccctgtctcgaaaaaaagaagaagaagaagaagaagaagaagaagaagaagaagaagaagaagaagaagaagaagaagaagaagaagaagaagaagaagaagaagaagaagaacctatgtatctgaagctgagatgctttcagaaactaaatgcagcaatatttaaaattgagatacaaaaatcatgacattataaaacatttgaatacagtgttattccaaatttttgtatacttcatgcagacttgaaagtacgtagttcttagaatttatgatcatgggaggctgttggcttctaacaccttcatttgacgggtagctctccttccaactccacttctgcctactcaacgcttcttcttactaaagacattctggaatcagaaacttctctgatcttctctgcctgtcaaaaggtgttaagatgaacctggaatttgtggatttgtaggccaaaaaccatacagaataagcaatgtcatatagttcaccctaacatcattcctctttcaccttacgtggtcctttatttatctgactgtcaactttagacagagaacctccctgctgaaagggacgtcagattctatcgctttgggttcaagcctcttcttcacatgctcgcaatgcatatttgctgcacagactgaggctaagggaaggtgccactgctcacccaccttctttgtcttcctttgcagcagtccacatgtgcagcgtcttggaacacaactgtgcccacttctgcctcaacacacctggctcgtacatctgcaagtgcaagcaagggtacattctcagcacggatcagaagacttgcagaagtaaggccactttgctgatgtgtcagtgttgcttgctctttagctaggtgtgtctttttttttttaatgcatgcccatgtgttataattttattcagccataaggaacataatcatgtcatttgaagaaaatgaatagaactgaaaagcatcatgtcaaacaaaataagaaaataagacatagtatactacatgctttctctcataagcagaatatatatatatatatatatatatatatatatatgtgtttatgtttctgacattccaaacattatcaaacattatcttttcacatgacaagaagatatctgcaaaatagcagtaagttaaaccaacttgacaactgtgcaaaatttttttagctaggtgtgtcttattcacccatagtccctctcccaacctacctgccacctcctcagagctggaaacagcttttgtatttcccggtattaccccctcacccaccacagtgcctaagcctggctcatagtaggtcactaggcaatgtgtgaaaggttggtggagatgctgtctctgagaagcagtccctctcacatctactgcctcttggtggaagctttcccaccctgactttattagctgggccctatggagccatttctctcttttatcttcttcccaaagcatggactaaggatgagatattgacctcagtagtcaagcattgtgcacgccccatcctagagatacgcagggatccggctgctttagtgatagacattttatggttctcctaatttaaaaagaaaacaaaaaggacaaacagatataaagcattagaattattagaacttatggtgttcttctctggcccagttcccaaaactagacaacacactgatatttaagccagcaggaggtaccctggcctttcgggaattaaccatatagtaagtgtatgcccatcctcttcttcctcctccttgtcctcctccttctccttctctgtaagttgtaactataaccactattttaaccacatacaacccaactgagcacacaaggcctgggaagactggctgcaaggaagcgaagagaactcagctaagtctgacgtgtagttcatgcaatgcaaaattgttacaataccacacggagagcaattaaacgctaatggaaagcagtttgcacaaatgtctgtaattagcactgcatttagaaagccaaaccacagtttccacttctcgtctcacttcttgttttcagcactgagcagttaatggaaggacctccctgtcccactgtcaacttgattctctgttctggggctcctctgtgaccccaggactcctggaacctttgacactccctcaggttccccagcagaagtcagtcacagcaaatattcacaggtttaacagaattcgctgacaagccagggagtctggaagggtcatctagaatagtctcacacatctcttgttcaccttgtcctcttcaggtgtgttcagccatcatgcccaccccttttctgctttctcctctttgaggagcataaaatattctctgtgtctcatgcccggtgattggctggggcctgggaagctgccagtgcctattttctatgggctggcttagccatgccagatgaattctgacaccaataaataaataaattaattaactaattaaactaaagagcttttcttccttcaatttcacaagcagtctttgtcagtcctgcccagcccagcataggcctggtattcccagactcctctcatcctgagggaagtgcctaggcttagggaaaaaaggaaggacccaagcagagctctgcctagcactgtggcatcaaagagctcaaagcagaggctacctgggctttgaacaggcaactaggtgcaggatagggaagtccactaaaggaaggacagaagcctagagtaaaggctcttaaattcaagagtgacaaatggatcagagagcaactcccagagtcctcggagactccaactctacaatccagtgtctccctttgtttgtcctttttcacaaaaagatgttgattttactttatgtgtatgcatgttttacctgaatgaacgtctgttcacagcatgtaccacatacctgtggaggccagaaaggatgtcagatcttctggaactgaatttatagatggttatgtgctgccacgttggttctaagacccaaacttgggtcctctgcaagaacaaccgtgctcttaatgctgagccatcattccagcttcctcttcctacttctctcttcctcttactactcctcctcttactcttcctcctcctcttactcctccccctcttactcnnnnnnnnnnnnnnnnnnnnnnnnnnnnnnnnnnnntcccattccttcacctccccaaaacatactgttatttataattacaggtgtcatagaagccaaaggtattattttcactgtgatctagagtggttgcgagccaccttatatgggtgctgtgaattgaactcaggtctttgacaagagcaatacatgttcttagtctctaaattatctctccagccctcctcctttttttgacacttagtttcactaagtgagtgaaactagaagcctctgtcctcttgagtttgggggtttcaggtttagtttcagagagcttctgcccgattgtttctgccctttgaggtcctataaccttgggcagtaagggtttggggaagtgtctagccaacactaagttaggggaagttaggggagacacacttggaaaaatgtggctgctgagccttgtcttctgcccaggcctagttatcctgagccattaccagaaccttcagcaccagaggtaaaggtgcacacttccttctcagaagcaaatcatactgtctcaactgaatttctgaaatggggtttgtgagactaacagggccattgtcgtccataggtttcaatttggaccctgacattatcatcttcaggttgtggctgcctcagccagacctgcttacttaaactctttgaccctcagtttcctcactcactaaatgggaacaatgatcacaacactgggaacttacaccgctgtttgaactacgacaatccatgtgctgagcccttggtgacaatggctgtgtgaaggctaagctgaaccagccagacctctgtctacatgctgcctccctgctgacactagtacaagactcctgggtgaaatgagacacagctacgcaccatttgattaacatcccactgactgttaatcctccatgccgttggctgtacacaaaatgtgggaaggtccctgagccactgccttgccacacagacacacattacagattaaagtatactttccttgctgctttctatgtatactctgcttttgtggagagaggggacagtcataggtgattcatagattcgcagagtgtcatggacatccatctcaaagtactagctccctttcccatgcaaatggagaactttctatctcctgtggtgtccaggtgagaaatggatctagagaagccaattatgtactgcaaagcacctggatcctagacaccctgtgttatcatgtgagctgaaatcttattctggcatttctacttttgatcctatttgtaccctctgaagccttactctagatacatgaataacctttcaggtatggaaaactattcatacctgatccaccctgggccactaatgtctctttttcagaggatatataacctcattttaggtgacctggtttggggcattttgagcgtctaagtaacatcagcttagtgaacaccaattattgcaaagtcccctcccattcaaaactagatcaaatgcattagagctcactttctgagttccactcatggaatggtctatattgctgattctttatgcctttcaaagggctttccctacccagcattatcatatgagacattgactgtaaaagtacttttatttgcctgaagtaattgttgtcttgaaggcttactgctgagtaagctcaccctttctactgctttctgaactctggctggtagttctactcagctgttgtagctcaaacatctctgtaagctgactgactcaatctgacttctctttgcttctcgctgaattgctctgcttggactcaaactaactctggcaatctgttctaatcttttggcttctttttattctctggctttatctttcccaactccactacactgcactcactgcactgactctcagctgactgactctctgtactgctcttgagtagcctcccttttctgcctgttctcatgagagctgggcatttcctatctctgacttattctgtcaaatctttctctgattcatcatattgtctgcccttcaattagatgtcactttcaaacaaggatgtttcctcttactaattaacctcacctacattgtttgggattaaaggtctacactaaggacatgtctgtattccaggtagaaggatcaaaagtatgtggtgtatctgtattctgtatggatcatatagacctagaatgtctctggatgtgatcagagctggattaaaatttgtctgcaatttatagatgtgttagaatagtgctagagtggtgaacacttaaaaagatatgtatggaaaagcctcatgtgttcctacacacccacatctgctctccatctctgtttgaattacttttccactagtaagacctctttcttcctcacccccatctcaggtttttggaaacaaggtctttctatgtagtattccctggctaccctggaactcactctgtagcccaggctggcctcaaacatgggtcaatctccccactctctgcttcccaagggctgggattacaggtatgtatcatcatacccaacttaatttttttaattttannnnnnnnnnnnnnnnnnnntgctaggaaaacaagaaggcatttggttagagcccagtcttcgtttattcctttgtctttgtttaataagattaatctcttaacagtctcccttgggtcagtacaaatcactcatggtcataaattacgacattctaaaaacagtatgaaagaacagcctcagagagccagctggcaagctcagtattcatggggcaattctctgggactgggagctttccagtccacactgcattctcatgtgtgtctggggagagaaaactgagccttggggttccaggtcacaaaagaagtctgaatactgtccactcagaggatcatggggattttttctttttcaaggggtttggtgattttctgactaccacactctggggattttgaggatatttagcaaacactgctgctgaaattcttcccctgagccagtgtagtttaacagaacgggtgtatcttggcacaactgtaagtaagtgaatttcatggttagtgtggtggaatggggaatggaaaggggagctctgccctgccctgccctgccctgccctgtccttctcctttcctttcctcttccttcctttctttttctttcctttttccccttctctttttttccccctctccttttctcgatgccaatagaatctctcattgggtcctggagcttaccagtcaagctaggctggctcatctatctctgtctccccagtgctggggttacaagcacctgtgtctgactttttatattgccttgggattgaactcaggtcctcatgcttgcctgacaggcactttgctatctgagcatcttccagttcttacatcagtgttttttgaaaggactccagaatgtctaatagacagggccacacagttattccttgcactttgcagagtcctggcctgtctagaaaataatcagcatttcctcatttgctctgtctgttctaagtcgtctggtacaaaaataaaaccacacagtatctcaagcaccttgttcatttgttttgaaatgatacttttaagacagtacacgaaccgggcagtggtggcgcacgcctttaatnnnnnnnnnnnnnnnnnnnncctttgtctcccaagtgctgggattaaaggcgtgctccaccactgctctgctgggtttttttgtttgtttgtttggttggtttttgggtttttttttgtttgtgtgtgtgtgactttaatattttcaactgttgatagtcaacaaacagaacagttattttaagatatacttcgttggtatgtctcccttttcatttttgattttgttattttggatactgtctttgggccctctggtaaatttggctaagggtttatctatcttgttgattttctctaagaaccagctcctgcttttgttgactctttctatagttctttttgtttctatttggtttgattttttgctgtctactcctcttgggtgtatttgcttcttcttgttctagagcttttaggtgtgctgtcaagctgctattgtaagctctcttcagttatttttggaggcacttagagctacgagttttcctcctaccactgctttctttgtgtttcataagttttgatgtgatgtgtcttcattttcattaaattttaaaaagcctttaatttctttccttatttctttcttgatgaagttgttattgagtaaagcattgttcagcttccatgtttatgtgtgctttctgttgtttttgttggtatttaacaccagtcttagtctgtggtgatctaatagggtgtatgggatgatttcaatcttcttttatctgttgagacctgctttgtgaccaattatatggtccatttggagaaggtaccatgtggtgctgaaaaagaggtatattcttttgctttatgatgaaatgttctataaatacctgttcaatccatttggttcgtaacttctgttagtttcactgtgtctctgtttagtttctgttttcatgatctgttcattgctgtgagtggggtgttgaagtctcccactattattgtcctatgtatgatgtgtgctttaagctttagtaaagtttcttttctgaatgtgggtgcccttgcatttggagcatagatgttcagaattgagagttcatcttggtaaattttacctttgatgagtatgaagtgcccttccttatcttttttgataacttttggttgaaagttgattttattcgatagtagaatggctactccagcttgtttcttgagaacatttccttggaaaattgttttccaaccttttactctgaggtagtgtctgtctttgccactgaggtgcatttcctgtatgcagcaaaatgctgggtcctgtttacatatccagtctgttagtctaagtcattttattggggagttgagtccattgatgttaaaagatgttaaggaaaagtgatcgttacttcctgttatttttgttgttagaggtggaattttgtttgtgtagctatcttcttttgagtttgttgaaagattgctttttgcttttttccagggtgtagtttccctccttgtgttggtgttttccatctattatccttttaagggctggatttgtggaaagatattgtgtaaatttggttttgtcaagggatatcttgttttctctgcctatggtaactgagagtttttctggatataatagcatgggctggcatttgtgttctcgtagggtccgtatgacatctgcccaggatcttctagctttcttagtctatagagagaagtctggtgtaattctgataggtctgcctttatatgttgcttgacctttttcccttactgctttgtttagtgcattagttagactggctgtccagtgagtctccaggattacagatctctacctccagccctggaatttcaggtacttctccaatgcttggctttgtatctggattctgggcatctgaactgaggtctcagtcttctgcagcaaacagatatccactgagccatctctcccagcccaggatgcaaaaattctcaacaacattttagcaagtagaacccaaccatactatatataaaaacagaaaaatatgaagagaaatcatggtttatcccattaatgcaaggttggtttaacattcatatgtaattaggtttaacattcatatgtaattaatgtaattcattgtattggtacactagtaaagaaaaataaatgaacttggtagatgcagagaaagcattaatctataaaaattcattccttaaaaaaaaaaaaaactatcagcaagtaagaataaagggaaaatggcttgatccaataaacagcagctctgagaaaaatcagcattgacattacactcctggataagaaactacattctcctctaagaggaggaatagaggaatataaagaagacacccacttctatcaacatggcattgaggacctaattggtataataaagaaagaaaaagaatttagaagccacaaggattagaaaggaaacaacagtgccacctttgtcaggttctgtgattccctatatagaaacactaattgagttttccttcttaaagctactaaactaattaaggagttgagtaagatcacaagatgaaaaagtctactgaattactttattgtatttctgtacactggcacctaaaattggtatcttaaaatactatgtaaaatagaataaaatataagttctggacaagtatttaaaataaacattctcatttgtttgttcttagagacagggttggtttgtgtagaccttactgtcctggaactagctctgtagactacggctggccttgaactcagagagatccctctgcctctgcctccagagtgctaggataaaggtgtatgccacaactaccctgacagtgttatttttcactaaaaactataaaagttttctgagataaattaaagaatatggaagaatatatttatcatgggttagaacattcagtatggctaaattgttaattcgctccaagattatctataaattcaaagtgattcccatcagaaccctccttaagttcttttagaaatcatgtgatttcaaagtattaacaaaaaatgtgtaacnnnnnnnnnnnnnnnnnnnntgtaaaatagaataaaatataagttctggacaagtatttaaaataaacattctcatttgtttgttcttagagacagggttggtttgtgtagaccttactgtcctggaactagctctgtagactacggctggccttgaactcagagagatccctctgcctctgcctccagagtgctaggataaaggtgtatgccacaactaccctgacagtgttatttttcactaaaaactataaaagttttctgagataaattaaagaatatggaagaatatatttatcatgggttagaacattcagtatggctaaattgttaattcgctccaagattatctataaattcaaagtgattcccatcagaaccctccttaagttcttttagaaatcatgtgatttcaaagtattaacaaaaatgtgtaacctaagagttgaaacagtcccttctcagtttttctggcagtgttagttctatgaagtccccatgacactgcattagcaaatattgaatctttgtctaggagaaaggtagggtcaccatactgtgatctccggaccaacattcatcagtaaatttgtaacctcatttttcccatgttgctatttaaataacccttattgtatgtatgtatgtatgtatgtatgtatgtatctctagatagagatagacatagacatagacatagagatagacatagacatagacaaagacaaagacaaagacaaagacaaagacaaagacaaagacaaagacaaagacaaagacaaagacaaagacaaagacaaagacaaagacatagacatagacatagacatagacatagacatagacatagacatagacatatctgacactagatttatagctagtcatgtaattaaccatgcctgatgagagttatctaacatttattttctccatgtacactgtatagccttcttgcactaaggaccactagagagtgcttcaatactaccttggagaaccatttaaacagcaaagtcaccaagaaaatacacaaaaatgtggcactaggtaggctgaaaacaagttgtgcgtttacatgctgaaagtagaaggcagaggagagcagcaactgcctcagctgggagcacatatgttggggacttggtatttgtcctgttccagtgtctgtggatggcagaaaatgacaaagtatggaatttgagtgtaagtaaaatgtttagcaagtaggcaaatttaaaatatgtgatctgagaataaagtgtatttgattaaaactttgaaaaagataaatggaattgtaggtttgaagctacttgcctttaagctatttacagagcagaatataatcaagacaatatatatggatatgtgtataatatcttgccattatcacaaattatgtagataacaattcaaagtgcgtttcaagacataagaataaatgctactaaatatcccagatgaatctatgccacagaccgggctcagtcggcccccctcaatccatgggaatcagggcctcagacagatgggcataaagtcggagaaaatggggtgacaaacagacaggacacaagggagtgtgctgtatctgaatgtaatttgtcaaattgagcatcaaactttttatacagaagaatatagggaagttaggtgacacatcagcaaggtacaaatgaggttactgaatgcttaatgactcttacacaaaacagaggaaaacaaacacaaagcctggcaggaactgggcagtaaaacaactgagacaaagtcagatctatctaaggtcagctatagtcttagaatccagatgtgaggtctttacactcccagggcaagggctttcatgcccaagtcatggtcctaattaaggagttccgctctagctaaccttctcatgaataatgcaatactctaaaaccacagcccaatctacttcctaaaccattgtaaattcctgtatataggagcgacttggcttttattctaagtgatagtgtgtgtgtgggggggggactttctactaataagtaatgtagtctgccgtacataactataataaggactctaaacttactttgctaaacttgctctgagatttctaactctatgtagtagatagtaatgcctgatttctttcacaatctctcttacaatactagaggcaattctgaatgtcactgaataggcaacattcttactgaattccaagcccagggttggctcaaggactacctagggcattggtgaaagccaggaagcaaagttcggttttgcttgggtatttggcaagacattgcttagaggcacctataacaaaacaatactggaaggaagcacacagatccattcacaaggataaaattggagcatacatgctgtggaatgccacagttccaagagactaagtttccgtgaaactcttcgcctcagggctccatccagacttttggcctgtcatgcgtgtcactactggagtggatgtagcaaatctataggaaaatattgccatatttggcaaaaaattcttaagacttaaaagaaaaaaaatcagtaaattttatcaaaattcattgatctctgaattatattaccactaaaaagaaaagacaaactaaactatgataaaacatttgcaaaacataaccaacaaaggatttcaaaatatataaagaagacaaaacaaccctttaaaaatagaaaaagaaaattgaatagacactaaaccaaagacagcatagagctgaggtgtagttcagtgtttgcagaatgcttgtacagtgtgtgtaagactgtgggttcaatcccaggactgaaaatcagtccaaaaatggcatatagataacaaagaagctcatgaaaaaatgctcataactagccagtaggaaaatgcgaactcaaaccacactgggtaccactacatactaactggactagatatatttttaaaagattttccttttctttttctgtatgtttgcgtgtgcacatgtgcatgtgtaccatttgtgtatgcatactcttgtataccagaaaagggtcctggatcccctaaaactggagttacagacagttgtacaccacccagcatgggtatgggagctgaatctgtcattctgattcaaaccaccacacactgcttataagaatgtgaaatgttttaccattttagaaattattttagcattttttataagcttggatgtgtacctaatatgtttacctaccattcacttggatacttacccaaagaagtgagttgtgtctaaagatctgagcacaaatgttcccatgcacttttattgcaataatcctactctggcagccatacatgctcctcatctggtgaatggataacgccctgcactcaagcacacactgcaatactacacagcaataaggaatgaactccacaggcagcagccagcgtgcctcagtataaaccttctgcatgaaaggaactagatgctaaaataggatacttgctgtaaattaaacaaagtattcctatcctatcccatctagcttcacatgaaggagactcagactatgattgattgattgattgattgattgattgactgatgtagcttttgctcaattactgggggttaccccctaatctaagtttctaatggataaactggctacttcctgactctgctccccaaatacttgctgtttgtgtttcttctgggctatttctgctccagcagtcggttgcagaggagagagcagagagtgagggcatttcactcagctttgtgctccccgctccatcacacctaatgaagaccttctgtgctctccttccctcctcttgtctcctacctgcaaccctcagccaggtaaatggaactccacctacttctaatctccccagccaattctatttacccaatagctgtaaattggggggcaaagtttacattgcatcacttggtgagtgaggagctgttcatgaggagagggtgcaactagatcttggggccagtgtttagcatttgaatgcatagcaacaccagaccaacccccagcaacttgctgtgtcatgctgacagagggcagatcagtggttaccctgcgaccaagaagaggggcagggggaggagttataggatgaacaaggatggtcacatttggtaccttgactttgttgataatgtgtagatatccccagtttatcaatttatacatttttaaaagatttatttattattatatataagtacactgtagctatcttcagatgcgccagaagagggcatcaggtctcattacggatggttgtgagccaccatgtggttgctgggatttgaactcaggaccttcagaagagcagtcattgcttttacccgttgagccatctcaccagccccaatttattttttactgaaatgcgttttttcctatgtagtccgacctggtctcatactcagttcttcagcctcagcctccccagcagcaggctgcactgccatggttgcttgactttccatttaatgcagtttgtttctgtcatttacaagtcaataaaaccagaatccgtaaatcagaatgagagctctgaaggtaagcagtgctccaagtgctacaagcaaaagagattatagaaagagtcttggaactggaccaggacacatgtgaaagcagttggaaactccagctgggtctttggacatgcgtgtcaagggcaaagttgcaattagtcttgtattttaaagtcaccgttggatctgacattagtgtttatgctgtactagaaggcaactaatgattcaaagatgccattcatttatacactccctatgggatcctttctgtgggtgagcactcttcctgggcatttctcttgtatatgtgagacttaagaaactcacattttagcttcccctatgctgcacacacagtgcaagatatgaaggctataatcagtttataattctgatcaatttcaattcagtgtgcattctttatgcctgcagagttatcgagaccacagcaatgatttgtcccaaggatgactttttgacataaagtggggtgagtgggcgggtagtagtaacaagactgacataattcttcacagagaaacacggtttcgagagcaaactacagagtccaggagctaagccacacaagtgcctagagaaggaagattatcactgaagggaaagcctaagcagaacaggcttgtttagtggtcaggagaggggtctggggagagacagagaggcagagagaaaagagacacacagagacagagacagacagaaagagagagacagaggtgggggagggaggcagggagggtgagcgaacagggcatcaactgcacaagtcagctaacccagctgccactaagagcagctgtgtagagagaggacttgctgagaagtaaatccagtcacccagcttcttgctactcctggctgctgagcctagagtttagagatcgtggtgtgtatcatttgctcactctctgcctgtgtcagggcacagagttaaaaacagaaggaatctggagagagaaaggccccgtgggagaactgaactgactaaacatgaagcaataatagtttagaaagaattccacacatggggaggtgagcctaaaccttgtgctacttttaagtgttccagtctccacctgcctagacctgataaaccaggacctccctgcagggttcacaagccacccgtggattctaatgtccgttctatcttaaagccctttgacccagacctttaactctcactcggaagctcgctgagtctacacgcaagggcacgagagcgtgcgtgcgggatgggataactttaaaaactaaaaaagcattgctctcccacaatgaagtattatttcatatattgcttcattnnnnnnnnnnnnnnnnnnnnnnnnnnnnnnnnnnnnnnnnnnnnnnnnnnnnnnnnnnnnnnnnnnnnnnnnnnnnnnnnnnnnnnnnnnnnnnnnnnnnnnnnnnnnnnnnnnnnnnnnnnnnnnnnnnnnnnnnnnnnnnnnnnnnnnnnnnnnnnnnnnnnnnnnnnnnnnnnnnnnnnnnnnnnnnnnnnnnnnnnnnnnnnnnnnnnnnnnnnnnnnnnnnnnnnnnnnnnnnnnnnnnnnnnnnnnnnnnnnnnnnnnnnnnnnnnnnnnnnnnnnnnnnnnnnnnnnnnnnnnnnnnnnnnnnnnnnnnnnnnnnnnnnnnnnnnnnnnnnnnnnnnnnnnnnnnnnnnnnnnnnnnnnnnnnnnnnnnnnnnnnnnnnnnnnnnnnnnnnnnnnnnnnnnnnnnnnnnnnnnnnnnnnnnnnnnnnnnnnnnnnnnnnnnnnnnnnnnnnnnnnnnnnnnnnnnnnnnnnnnnnnnnnnnnnnnnnnnnnnnnnnnnnnnnnnnnnnnnnnnnnnnnnnnnnnnnnnnnnnnnnnnnnnnnnnnnnnnnnnnnnnnnnnnnnnnnnnnnnnnnnnnnnnnnnnnnnnnnnnnnnnnnnnnnnnnnnnnnnnnnnnnnnnnnnnnnnnnnnnnnnnnnnnnnnnnnnnnnnnnnnnnnnnnnnnnnnnnnnnnnnnnnnnnnnnnnnnnnnnnnnnnnnnnnnnnnnnnnnnnnnnnnnnnnnnnnnnnnnnnnnnnnnnnnnnnnnnnnnnnnnnnnnnnnnnnnnnnnnnnnnnnnnnnnnnnnnnnnnnnnnnnnnnnnnnnnnnnnnnnnnnnnnnnnnnnnnnnnnnnnnnnnnnnnnnnnnnnnnnnnnnnnnnnnnnnnnnnnnnnnnnnnnnnnnnnnnnnnnnnnnnnnnnnnnnnnnnnnnnnnnnnnnnnnnnnnnnnnnnnnnnnnnnnnnnnnnnnnnnnnnnnnnnnnnnnnnnnnnnnnnnnnnnnnnnnnnnnnnnnnnnnnnnnnnnnnnnnnnnnnnnnnnnnnnnnnnnnnnnnnnnnnnnnnnnnnnnnnnnnnnnnnnnnnnnnnnnnnnnnnnnnnnnnnnnnnnnnnnnnnnnnnnnnnnnnnnnnnnnnnnnnnnnnnnnnnnnnnnnnnnnnnnnnnnnnnnnnnnnnnnnnnnnnnnnnnnnnnnnnnnnnnnnnnnnnnnnnnnnnnnnnnnnnnnnnnnnnnnnnnnnnnnnnnnnnnnnnnnnnnnnnnnnnnnnnnnnnnnnnnnnnnnnnnnnnnnnnnnnnnnnnnnnnnnnnnnnnnnnnnnnnnnnnnnnnnnnnnnnnnnnnnnnnnnnnnnnnnnnnnnnnnnnnnnnnnnnnnnnnnnnnnnnnnnnnnnnnnnnnnnnnnnnnnnnnnnnnnnnnnnnnnnnnnnnnnnnnnnnnnnnnnnnnnnnnnnnnnnnnnnnnnnnnnnnnnnnnnnnnnnnnnnnnnnnnnnnnnnnnnnnnnnnnnnnnnnnnnnnnnnnnnnnnnnnnnnnnnnnnnnnnnnnnnnnnnnnnnnnnnnnnnnnnnnnnnnnnnnnnnnnnnnnnnnnnnnnnnnnnnnnnnnnnnnnnnnnnnnnggtttctctgtgtagccctggctgtccaggaaactcactctgtagaccaggctgggactcgaactcagaaatctgcctgcctctgcctcccaagtgttgggattataggcgtgcaccaccacgctcggtttatttgattttttttttctaacaagtggtagttctttttttttttttttttttaaagatttatttattatatgtaaggacactgtagctgtcttcagatacaccagaagagggcatcagatctcattatgggtggttgtgagccaccatgtggttgctgggatttgaactccagaccttcggaagagcagtcgggtgctcttacccactgagccatctcaccagccccccaagtggtagttcttaaccacgccttactccctgcttacaagatagtgttgctggtccctcattatatacccaccagatagtcagtatttaaccatctgtctagggaaaaggctctggtttacagtgttttccagtttccctggtataaacactctaccatggccatttcaagctacctatgtggaagaaatgccagtcaactccagcacaccaaagaatcccttactagattctcagtggaatttttttccttacatcttttctgatccatttgattcactattgttttccttacacaatgaagaatgttcttgaatgaacaagtggaataattctgtcattcacagaaattccttcacagaccacatgccaggcatcaggctgagtagttgagcttgcggagtctgctcctgtgtgacaggcaggataggttcatgttatttacaaattaagcattaagttagaattgttgtgagaactatagggggaaactgtgagggagaacttgacaaatgcaactgatgtctctttggaaaatacactttaaaaaatattatatatgcactctgtcttcacacacaccagaagaggaactcagagccccttctagatggttgtgagccaccatatgaatacagggaattaaatccaggacctctggaagagcagtcagtgttcttcactgcctagccatctctctgcccctcataaaatatactttaagatgtatcctaaaggatacataaaaattaggtaggtgaaaagcaggcaaggaaggggtataaacatttaaggttaaaaaaaaaaaagagcaacatgttcagtcttggagcatgaaaaatcttgatttgaaggataaagaggggaaatagagaggcattaactaacactgaagagtagccaggaattgtatagtactctacctcgaattggatggttgggatatcacgctagagcatcaggaagccactaagacagttaagcagaggagagaccagagggagttgctgcaagatcctgaggatgaagtctttgaacaggcttctgaaagagatgatgcttgactgatgtctcaagccatacttgggtcaccaggcaaagaaggcagaaggctgtgccagggtaacaggaactctgaagccaaggtctcttccatacccagaagtgggtttatcactcttcagtgaagtcctccaggccttgagggagaaagttgtttttcaaaagcataaggaattgtccaaaaacttttgtacttttttgtcaaatggaagtgttcaatgctaggaaaacaagaaggcatttggttagagcccagtcttcgtttattcctttgactttgtttaataagattaatctcttaacagtctcccttgggtcagtacaaatcactcatggtcataaattacgacattctaaaaacagtatgaaagaacagcctcagagagccagctggcaagctcagtattcatggggcaattctctgggactgggagctttccagtccacactgcattctcatgtgtgtctggggagagaaaactgagccttggggttccaggtcacaaaagaagtctgaatactgtccactcagaggatcatggggattttttctttttcaaggggtttggtgattttctgactaccacactctggggattttgaggatatttagcaaacactgctgctgaaattcttcccctgagccagtgtagtttaatagaacgggtgtatcttggcacaactgtaagtaagtgaatttcatggttagtgtggtggaatggggaannnnnnnnnnnnnnnnnnnnnnnnnnnnnnnnnnnnnnnnnnnnnnnnnnnnnnnnnnnnnnnnnnnnnnnnnnnnnnnnnnnnnnnnnnnnnnnnnnnnnnnnnnnnnnnnnnnnnnnnnnnnnnnnnnnnnnnnnnnnnnnnnnnnnnnnnnnnnnnnnnnnnnnnnnnnnnnnnnnnnnnnnnnnnnnnnnnnnnnnnnnnnnnnnnnnnnnnnnnnnnnnnnnnnnnnnnnnnnnnnnnnnnnnnnnnnnnnnnnnnnnnnnnnnnnnnnnnnnnnnnnnnnnnnnnnnnnnnnnnnnnnnnnnnnnnnnnnnnnnnnnnnnnnnnnnnnnnnnnnnnnnnnnnnnnnnnnnnnnnnnnnnnnnnnnnnnnnnnnnnnnnnnnnnnnnnnnnnnnnnnnnnnnnnnnnnnnnnnnnnnnnnnnnnnnnnnnnnnnnnnnnnnnnnnnnnnnnnnnnnnnnnnnnnnnnnnnnnnnnnnnnnnnnnnnnnnnnnnnnnnnnnnnnnnnnnnnnnnnnnnnnnnnnnnnnnnnnnnnnnnnnnnnnnnnnnnnnnnnnnnnnnnnnnnnnnnnnnnnnnnnnnnnnnnnnnnnnnnnnnnnnnnnnnnnnnnnnnnnnnnnnnnnnnnnnnnnnnnnnnnnnnnnnnnnnnnnnnnnnnnnnnnnnnnnnnnnnnnnnnnnnnnnnnnnnnnnnnnnnnnnnnnnnnnnnnnnnnnnnnnnnnnnnnnnnnnnnnnnnnnnnnnnnnnnnnnnnnnnnnnnnnnnnnnnnnnnnnnnnnnnnnnnnnnnnnnnnnnnnnnnnnnnnnnnnnnnnnnnnnnnnnnnnnnnnnnnnnnnnnnnnnnnnnnnnnnnnnnnnnnnnnnnnnnnnnnnnnnnnnnnnnnnnnnnnnnnnnnnnnnnnnnnnnnnnnnnnnnnnnnnnnnnnnnnnnnnnnnnnnnnnnnnnnnnnnnnnnnnnnnnnnnnnnnnnnnnnnnnnnnnnnnnnnnnnnnnnnnnnnnnnnnnnnnnnnnnnnnnnnnnnnnnnnnnnnnnnnnnnnnnnnnnnnnnnnnnnnnnnnnnnnnnnnnnnnnnnnnnnnnnnnnnnnnnnnnnnnnnnnnnnnnnnnnnnnnnnnnnnnnnnnnnnnnnnnnnnnnnnnnnnnnnnnnnnnnnnnnnnnnnnnnnnnnnnnnnnnnnnnnnnnnnnnnnnnnnnnnnnnnnnnnnnnnnnnnnngatgacccagtgactgcatcaccatataaacacatgcaccattaacatcatgatgcatgctggggagggagcaagcagggtctgcgctggagtgcacagccagccagtgtgtgaggccaaaactcctcatagcaccaggcaaactggctgtcaccctccaggcacactgaagcctgggactgagggccctaatactgttctcatacaagtcaatggttttcattgagctatgctggaagtctgctaaggtccccagagctgagaatacctgtgacagatgctgtcagtcacacgagaatacaaagcacagtttggatggagtctcccctgttgaacagagttcagattcggcagcctactagagggctctcagcatctggtgttagcaatccttcccaagctctcctgccccgttccatggaattcccagagtaaactccaaatgccaagcctctcctggtctcctgcatatcagcatgtcccctccgtctccattctcctgcttagacctgagcagtttaatatgtgagagtgtaaatcttaagtttttttgtaagggctccagctcaagctgcagagagatggctccatggaaaagaacactggctctcttccagagcatttgggtttgacttccaacacccatatgacagctcacaacttttctaactccagttctaggggatatgatgccttcttttggcctgcttgggaactacattcatggatgtggtgcacagtcgtttgtacacgcaggcaagcacccatacacataaaaataaaaagttttttaaaaagtgcccagtttatttaatagagatccgtttttatcattttgtcaatttaatgtttatctgaaagcacaatacaaaattcaaaggccaagtacttatttatgtatgtttttgtgtatgtgcacatgtgtgtgtatgcacatgtgtacatgtctgtggaggtcagaggacagcctcagctgttgttgctcaggcaccaggcaccttttgcttgagggtctgcctatgtctttgccaagggtgtgaggcaagctagcagggagtgccagcgattctgttccgcctcccatctcactgccaggattataagtgcctgctaccaactttatatgccccagtacaggggaacgccagggccaaaaaaaaaaatgggaatgggtgggtagggaagtgggggggagggtatgggggacttttggggtagcattggaaatgtaattgaggaaaatatgtaataaaaaaaaaagaaaaaagaaaaaaataagtgcctgctaccatgcttggctatttatgtgggttctggggatcaaactcaggtcctcatgttgccaagacagtaactttgcagactgagccatcatgcccaggaagggacaattagagaacctgcattgtacaaagtaaatgagacaaatgcagacccgtggatgttcatggtgctaagaatatgtgacagtagagggcttatccctagaaaaggggcttatggctcagcagttcagagcacttccagagggtcctgagttcagttcccagcaaccacatggtggctcataaccatcagtaattggatctgatgccctcttctggggtgtctgaagacagctacagtgtactcatataaataaaataaattttaaaaagattttaaaggcagggggctttatgacaccccctctgaggccaaggggaaatcacagaatggggagcagaaagaatgtaagagcgggaatatgggagaaggaccacagaatgcactctccaggacatagcagccattgaaatcacgctgttccagcagccctggccgcctgcactgggccttcacaagactggccatagttaatcatagatccataggaacttatgggcccgactcttccttgctgagctattgcctacagatggattcctggggaaggacagtcattatctttagttgtatacccattggtaactccatcccccaggatgtactggatagtcctaaactcaaggtttcacagaaagcccagggtaaactcagtgggtcacaggatgaaatgacatgaatatggggaagagactggtagggagaaagaagagcgagagaaccagaaaagtattacttgtacaaaattgtcaaaaactaatttaataagggatattttagtaacaaggaaggatgatgaggctggagaggtggcccaaccacaaagagcatcctgcggaggacctcagttcagttccatgtcaggtggctcacaacagcctgtgtcaccagccccagaggatctgaccccgtgctccctctgtaggcagctatgctggtgagcacatacaaacacacagttaaagataaactcaatctttgtttcagtggtacagactctttttttccttttaagtataaagattagagtcagcagctgacagttttctgggtaactgagttttcatcacccttgatgtagtgatgctttttaaccaaaggaatatctctttaattcattcagtcccctttatgctctctggcttttgctgattttaatggcaggattgtaactagagtgtcatttctgtcatttcatggcatccaaggagtctccttgccagaaaacagcatcatcttgtctgcccacctgtgccaaggagaggctgactcactgatgggttgaaggtgcctttaacctcttcttcctctaacgtattcctaagcccatggctgaggagaacccccatacacatgttcccatactgcgtgtgaatgaccagctgctcagcactttgtggatatgtgatgactaactcaagccagactgtcaatagtcactcctctgtcactccctgtaatttggctcgtcactcatggcatctggtgtcgattgtgcaggtggacaagcagagcacatacaaagttttcctagaacctttcctatagtcagatgggaagaggaaaggatgatggaaatctaaagatcggtgttgtgcttggacttgccacgggtctatgtcagtgttctgttgccatgaagaaacacaatgggcatgccaactcttaaaaggaaaatatttaactgaggctagcttacacttacagtccattattgtcctggtgggatgcactgtggtatgtaaggggacaaggttctggaaaggtagctgagagttctacatcttgattggtaggcagcagaaggacagagtacttgggcttagcttgagcatttgaaaccccaaagcccttcccaagtgacacactttctctaataaggccacacctactccaacaagacaacacctgctataatagtgccactccttggtgagagcctgtggggtccattcctactcaaaccaccataccatgtttccagcagactgttaagtccgtaccttacttggctgccttatctgcacagtgtcaaaagcagctcaaaactaagtcatcccggcatgtgttggtgaagctatgcatgccagagattaggaatggtactttctgggagcaattgaacctcttgcgctcagctcgactcatatgagccctcaaaatatgttcagagcggttttcattaccacaggaaaagacaaatattaattaaaattattcagtttccatataattccaactttgaaaatgtttttaatatatgctaaaatgcacaaaatgtcaccagtgttttttctgggtagtagactgcaggtggagttcccttttatctattttgccctcaattttctacaatgataataatatattaaaatgtgtaatgtttctaaagattactgtagtaagtgctatagagttgaagtgtcatggaccaatagctcttctcctccagagttatgtgctaatggtgcaattttgtctcagtccaggatttgtgtgccacagaggaccatggttgtgagcagctgtgcgtgaacatgctgggttcctttgtctgccagtgctacagtggctacaccttggccgaggacgggaagcgatgtacaggtaggtatctctccagtcctgtgtgccgaggaagggcacattatgaataggaaggacagtgggtagaacaaacatgcacaaagcccagattgtcctttgggttttaatgaagttcttggttttgtggtctagtttttaggcagattttgaattttaaagacttagtttttacttggggtcagtatctgtttattctagatcattcacataaaccatgcttgaagataatctatataaatgtaattgctttctacttcactgcttgaaaagggcagagcgtggggatgtaactgtaagctcatgtattatacatacattttacttggtgatgggcagggagggatactatgcagtacctcaaaaacactggcagtcttatctctcactttggacctgcaggtcagtgaaaggctcaactgtgtgcactggcatcatggtcacagaaaataagcaatctcaaacataaagctggggagggggtctccagcaagtgcgagctacaaacacagactcacagctgaacacccttccaacttgaggacaccacgctgagcgctgagcgggttaggggttgggctagcctctgatttcttcactgatgggttgtagttttccttagcccttggcgaacaggccagaaaacccctaatatgtatgcaggaccttcctgattggctaaagtacccttgcctgatcttatttatcattagagcaagaaatagtaggtaaataacagatgttcagtaaggtgagctgaagtgaacatagagtcctgaccaaatctagcttttctgttctatagcccattgctttcagaggtcatgttgattctcttcatgtcctgtttcctttatgcttttgtattacttttttttttttttttttttggtttttcgagacagggtttctctgtatagccctggctgtcctggacttcactttgtagaccaggctggcctcgaactcagaaatccgcctgcctctgcctcccaagtgctgggattaaaggcgtgcgccaccacgcccagctcgcttttgtatttcaaatgcatattttccagcatacctagattgttaggtttatgaaaaaggaaaacgacaacaaaaagcggccatttgctatttgcatgagagtaatgagagtattgcggctttgcttttatacactggtgagtttgaaaactaccctcatctgagatcagcaaatggaatctgtctcctaagccttggagctatttactggggatggggtgttaatttcctggtggcaactatgacagagtgtcagagtattctgttgacacaccgccaaaacagacgtcaaccctgatccaaccaattattattttgcttcactaattctttattgtacaattaatatttaaaggttgagaaaaatcactgctaataattcattgcattttctaccatagtttcccccatagaaatatgtactacaaaacattttttttgcgcctttctgttgttaaatgagtagaaactttgtgaactgaaaaagaaatgaaaagaaaaaggtgggggatgggcatatgaggaaggacgagatagtgccaaggaggcaggagaaaagttctaattgagtgagaggagacacagaatgaactaagagtgtgaaagtcacagaggacagacgagcaggaggccaactcctggcccttgggaaactggagggtggtggggaacccattcctctccgttaccaaataattgtctaattgtcccagagtagtggagaatctttgtgtctctcaggattatgctgtaagcttggaatttgacatttgctgaagggtgagtccatgctgtggttgccagggagcagcactgtattgtattcatccaagaagagtgcttttagtgctaatgcttataagcatatgagagtgtcttgggctggagagatagttcagccattaaagtctaggctcacaatcaaaatgccaagtatgtcttgcctgtatttggccatcaagcagaaaaatggtaagccaagagaaacatatatcctaaggtggtgcacgtctcatccccatgatggtccttacgttaccatcttccactgcccttgacagccgctgaccaagatctatgaggagataggtgtgagatgaccaagtagaactctgtggccagtagcctcagttaaggggtcaaatttctagaaaggcagttgctgcatcgagagcccagagaggacagaaatggagaagagagacatctggagagctaggttggaactatcactgtgccctgagtgagtgtcaatctcttaggtaccgactcatgagttctagttaacatctccacccatctgagttactgaactgcatttactcattgagatgccctatgtggtttagtggagctcctgactttgaaatgcgttagctgctattgaagctgtattcattgtcaccccactctgtacatcactcatggactgtgctttttctctgggagtgcgttttctcgtgaacttgcttacccgatgtttactagtggctttgtaaatgggggtagccttggtcctattttccttccaactatctgagcagagtagaaactgagcaagttgaactcttcctcgttaggttgaacttgcattgccgtttctgtcctttgaatgagctctccctcaattagtttttaaactgcaaattcaatttttcctttttgtcttcattcattcatgctctcccaataaaatacctaaagctggataattcattagtagaaatgtattctaaatggtacaggctgcctggtgaaagttgctctctgttttcaaggtggcaccttcaactctgtgtcatcttgtcatggaaggtggacaggcagacgggactgaatactatggagacctttctaaagattggttttatttttaagtgtgtgtgtgtgtgtgtgtgtgtgtgtgtgtgtgtagggtacatacatgtgagttctgaggcccatggaggccagaagaggaagtggttgcaatctgccatacttggatgctgggaacagaacctgggcactctagacgagcacttcactcaagcactgagctactgaaggcagagcccttgtggtatggccacttactaaaggccacatttcccagtactagtgcattagaaattaaatttgaacatgaattttggaaggacataagaattcaaatgattacactaatttgcttaaagtcactcacatctggtactggcttgtcagtggtatcgaaggcgcaacacactgactgattccgtcatcactgaactaagtgctcctgagctaaataaatggcgtaggtgtccatacgtcgatcagtccaaccttatgttcttagagtgatggtgataaaaatgtacttgcatttattgactgttactggtcctggcacctctctgaagtattttacatgtatgacagtcatcctgtgtggaaaataccattgtcattgcttttatacatctctggatttctttatggttcaaccacctcagtctgtaaagtaaggataataacatgaagcttacaggtcaatttaacatgtggctctattagagtcagataatctaccaccatttcaatgtctagtggttaggtacttgatctcagttagatgcttgcatttcctttgtgactgctttctatgggtgactacatgtaaggatgtctctaaggtatgtgcactagttaacttctctgttgctgtgataaaatatcatgacaaatccaccttagtctttgtcactgcactaaagtactgtttatgtctgaagacagctgggtggtttctcacacattgagcagagactacattcagcaaggctcatttctgactcttggccctctgtgatctatacgcctggacaaggaatgatggccagggagttccagtattcttctcatctttgaaggtgcacatagagactccaggcagagataacggaagggattttgttggagtgaataaggagagtggtcagctccagacatctgcccataaccttggccttccttttcaaaagtacaattttggaacttaggaagttatgcaacaaatccaaaatacttggtaaagaaagaccaagatgagtccactagaactttctgtatcctaaaactctgaggttcacatgactggaaatgggttttttcatgtccaactgctgattggtggcctggaccaccacccctaagtggcctgatactgagtcaatgacagcattgaaacattgaaattgtatagaccagggtctcaggaacttccagtcactgaattcagcccttccttggttcagacaggtgtgcacacagaggacaaagcagcctcagaatcagcccgagagaatctcattctgtgacagtggcctgtagctggctgaggaatggaaaataccataaaaaagggatgccctaaaaactatgagttcagctggtagggcatggttatatacaattgtaacccaagcacttaagaaacattgctacaaattccaggccagcttgacctacatactaagagactctgaccctgccataaacctcaaaacagacagctccattcctaaacatctcacctatgtacacaaacatatcttaattgttttaattaaaaacaagtgtatgtttaataaaagtcatatttaatagtagtttcaaaacattaaataggcttatttgaaaaaaatagcttatttaacatctttattgtatacatcattcctgtgacatattatctgggatttttccagtttggagttctttaagttggcacaggatatgaaaatttctgtaaaataatctagggtcaggatccttgttgatattaataaaaaatactccatctttcatatttataataccataaaaattattgttctcagagtaactttagttggtaccaagcctcaagtttctccgaagttattaacttaatttttatttttaagaaaaactctgagtgcttatacttacttgttattattatagttagttacaatatcatgaacagatgtcatgtatagtatgttgttacaatttaacagagactattaaaatttatcatacactagaatcccctagggacttgttgacacagattccaggttcccataaccagaaattctgatcccacttgtctagggcaggaccagagaattgatattgtaggtaaattttcaaatgattgttgatgtgagcagttcacagaccacaacttgagaacttatgccttacagacataccatgtggtcagcggaagaatgagggtgttcaagagcacaggtgtcccaccacactgctctataagcacacatctcagccaaggtgagatatgcacagatagatagtctagtatgcagggactccaactacctcagtcacataaagtcccagaggccttaaagggaaagagagctttgatttatgaagaattgtgttcagctttaaaagctgcttatgactcctttgatgggtattttgttccctattctaaggaggaacaaagtatccacccattggtcttccttcttcttgattttcttgtgttttgcaaattgtatcttgggtgttctatgtttctgggctaatatccacttatcagtgagtgcatatctaatgacttcttttgtgattgggttacctcacaaaggatgatatcctccagatacatccatttgtccataatatggacatataagatggaatacagggcccccagtggagaagctagagaaagcacccaaggagctgaaggggtctgcaaccctataggtgaaacaacaatatgaactaactagtacccccagagcttgtgtctctagctgcatatgtagcagaagatggcctagtcagccatcactgggaagagaggcccctaggtcttgcaaactttatatgtcccagtacaggggaatgccagggccaagaagcgggaatgggtaggtaggggagcagggcgggggtagggtatagggaactttcgggatagcatttgaaatttgaaatgtatataaagaaaatatctaataaaaaaagctgcttatgtagaatgttatcttatatagtttcttctatagcttccaaacaggggattatgagaagttcaaaagaggtgaagaatctgagttctttgtgatatagtaatgtgacccttgtctatgtagcaccagaaatatcataggacttgaaagtcaagtgctatgtattaaactcacagatactaggggctattagaactacttgcagaggtgatgttttaaaagctttgcttccgactgaagcttgattcactcagaaagcaaaagaagcacacaacacaggctgttgctctttaaggtcttggcttcccctctgcatccttcaggtacggtgttggatgcactactgtctcatccatgcatgatttttcttgtaaggaactgcaaaggccaatggagtgcacagcacagtgatagagcacttgcctaatacgcacaggctctgggttcagcccttagtacagaaaccacaacaaaaagtacgcatgtatcaaacatatatttatctatctaatcctaccacttgaatttaacagtaactcttacttcccatttgtgggctctactttaggaaaaggatataatcactatacatatgcagttttgagatctgctttttaaaacgttaccattgattatttctgggatggggtagtgcacatgccacagcacacatgtggagccacaggacatctatgtaactggttctctccttctgccccttcatgggttcttaggagtctgactcagtttgtcaggatgacacagtgtctttattctgagctgtcttgcctgcctgggatctaatttttttcaccagactttgtatgtctatgagcaatgtagccatcacaactataatgctaatgtccccttgatgctccagatggtagtgtgggtcctcctgccacaatcttcaaaccatctctatcttagttcttggtcgagccatccttcctatggttctgtccaaatgtctggagttgatcttgatacttttctctggattcatctctaattcagcaggaatcccattggccccacgtttaacacccagggattggccctagggctatctaccaaagtgtcctaaatttgggggacttaaagcaacagcaatgtcaaaaatataggaaactagaaacctgaaccaagatgccagcaaggccatgcacacaacaaagggtcttcctgccccttcttaatttgtgatactaatttgcagtcctgaagtctaataatcttcacatgataccttccttaacaaagtgtgtgtgtgcatgtatgtgtgtgtgtgtgtgtgtgtgtggtgtgtttggtgtgtgtgtgatgtgtatgtgatgtggtgtgtgtggtgtggtgtagtgtgtatggtgtgtgtttggtatgtgtgtgatctggtgtgtgtgtgtggtgtgtgtttactgtatatatgtgtatgtggtgtgtgtttagtgtatatatgtgtggtgtgtgtgtgtgtgtgtgttatgttttataaaaagatagagaggaggaatatgtttggtggatgtgcagtcaggtgtggtggaagtaggtccctctacaggcccatgctgaggcatcccttccccctgagggaccagccacagaacagtattgtatagaatagagtttatacgtggcatggggaggggagttgagagggcagtaaagacaaagaaaagcagannnnnnnnnnnnnnnnnnnnnnnnnnnnnnnnnnnnnnnnnnnnnnnnnnnnnnnnnnnnnnnnnnnnnnnnnnnnnnnnnnnnnnnnnnnnnnnnnnnnnnnnnnnnnnnnnnnnnnnnnnnnnnnnnnnnnnnnnnnnnnnnnnnnnnnnnnnnnnnnnnnnnnnnnnnnnnnnnnnnnnnnnnnnnnnnnnnnnnnnnnnnnnnnnnnnnnnnnnnnnnnnnnnnnnnnnnnnnnnnnnnnnnnnnnnnnnnnnnnnnnnnnnnnnctctcagcttccaaccattctgtctccacctcctgtctcaccatagcagtgctgagttacagatgtgatctactattatctatctttctatacaggatccaggagttggacttaggtccttgtgcatggctagtatatttgcttgctcttcatcttcctggctattcttgttgcgtgtggcttttactaccctgccaagctccgggaatagactgctatgagcccccaccccacttcccttgaatccacagataaatgacacacacacagagatgttcattttcaacttaccttcttggtgtaattgctgggcattattaaactctcaaggctagcatgcccttatcgacacacttcccacctgctctaaacttttgttgctcagttacatctagtacctgccaaacacccttgaccatccacctgtaggagtggcctgtgtggccactctgttttgagatctcacatggatggagaactctcctctccttgccttgcatctccctgcttgcttccagagacccagaagtcctatctatcccttccacccagcaattggcccatggcttctttactgacagatcaagaaccaattggggaacaggaccttaacatcagaaccacccctacttactccttttcatcagtcatactgacttgtcttcatgttacccttattacctctgcttccatgtaaagccatggacaccagttctgagatctatagaatgttaagtccttgaagcccacatgtctcttttaaccacacaacttgtgtctctacctctcttcccgctctgcattggtcttttttgctagttctgtagcacagtacgtgtgaccccacctcctgacctttccacttacctgggacactccagatgtccttatgactagtacctaattcaatactgcccaatcacctttttagagaaccctttccagaccacctctgtcatatcccagcttccttccccgacaggtcctactcaccttgatttcctctagaacattctccatcttctaatggatgatgttatttaatgactttggtcataccaccaccaatgttaacactttgaggctgtgtgggtcttgtttgttatttactctgtctctaacatctaaaacagggcctgattcatagtatatactcggtgaatatatatatggaactaatgaggtataatccagtatgttttctcatgaaccactaaataatttacccttattataagttcttatctgactttcaaacctatttgatcactatggatgatgctactataaatatcttactgtatataaataatttcccactccagttattttctagaattaggtttgcaaatttaaatgatcagattgcttccataatgattcttattgctattcatgatttatgtaattgtttgtgctgacttactgctttgagttttcattcctttgttgtttttatggtcgtggagcctcttgagtgcaagataagtgcgctatcattagctatactaacagctgccactaagttttgtctgatctccattttccccagttcaatagatgtgccttataataattttgatttgattttctttgatttttaaatatacttgtccatatatgttttatattccagaatgaaagcctgatttagattcatgatttttagggggatgttgcatgtttatttatccatattgttttgggggggtggaggatgggaccattattagctctaattatttttgttataggtattctgacattcttctgcacccttctttgtatcctaaatgtgtgttgttttcttcagctgtggactactgtgcctcagaaaatcatggatgtgaacacgagtgtgtaaatgctgaaagttcctacctgtgccggtgccacgagggatttgctcttaacagcgataagaaaacatgctcaagtaagttacacgcacatgcacacagcgtgctattgtggtgggcactgtggacgtagaccttcctgcacatggattagcccatgctaagtcatgaaaatctgttcctattcctcctgtgtcagcctttctgtatagtcctaagattatggcttacttggtctcaataatctccagtcaaagtttttggtgatggcatcttttgttagagaaagacatgctaacaaccaaatcagcatcccacatgctgcctcagtatggctgtgcctatcatcataacagggcctgaagaacattttcacttaagctctgtggtttgtgggctccagctctgactccacgtgagggccagaaaatcgctgagccaaaaggaactgaatgtggtttcttgagggtggggtggggataggtggatggcattttgctgagaactgctcaagttttctgtaaactgtttagttctgtttgattttaactatatgcataaatattgaactaaacttaaacttctaaaattggaacagaaaaatctataaactaaaggtgatcaccagttttataaaagatgccaggagtactcttttaaatataaatgtgcagagggacactttggaacttctgtggatagatttattatcctgtgatactgtgggagtgtcacttgaggaatgcctacttatgaaatatcagggcccagtgatattttcataagatccaataacaattagaaataaaataagttatctctgcaatgtatatcaatgagaaaataggattttaatttataaaaagttggtgtactttccacctttcaaaggtatatcctgtatgtactactgtgtgtgttttcaaaggcatcctttctatttcctattctccaatccctaactattaacagcttaaaaccctagagctagagacagggcatattacatcgaaaacatatgttactggagcccaaacacgagccagtaaaaacaaaggaggtgaagtcctgggatgaggacagatcttggctggattttaaagtaagccatcatttatcacacaaagcagggaagaggggctgctgaaagaagaaaaaagtgctaagataggagcagcttagtccagagctggactaagatagggtatttagacctccatgcccagtacatagctcatgtacaactgtttgtttgcttttggaagggatgagtggtttagtaggctgctctgctccgagtctcccctcctttctgtacaaaacttgagcagttcccatcaagatgctgtctacctagccccaccacaccctcaagaaaccatattctgaactagaaaacaacagtcaggctgccattgtggctgggaactgtggtcactgggctgatgaatcagcattcctgatcaaaggtggactctgtgggcaatcttgggcaaaccttatgccacaatgtcctcaactgaaacaggagatggtaacacttaaagataattcagtctgttatcttaaagactaaagaagatcatttatagaaatgatttatcaaattgctagtgctaattacattttcacaaaagatgatgctgggatctgggtacatcacacagttggtaaggtgactgctgtgccagcaaggagatttgagtctctggcacccctgtgaaaagaaacacaactgaggaggtataaacaggaggctccctggggcccactggccaacgagtctagacaaataggtaaacttcaggctcaaagaaagatctgatctcaaaagattcagatggagaacaattgaagtatattcccaacgctgacctctgccctccacacatgtgtacatgcttgtgcacacatgaacacatacacactaacacaaagataacactagccacaaagattttagtattaatgagcatgtaccatatgccttgacaaagcagaaaggtacataaaaactcaagacttctgttgaaagttagcgggaacacaagtcctaccacacagagcagtttagtcacagcaccaggacacatgtgacccagggtccatggtgtgatggagacatcctggactagggaagttggaagcatggtcccatggtcaaaggaatgggggaaaacacatctgtctgatctcaaaacttcctcctggaaggagtctcgatcacattcccactttagtttccagaacagcttcatcctccatactgtccctcagcacattccctattactaaatcctattccaaacatgagagtggaacagacaaggtcagagcttctcaatcagatctggaagtagaagctgcagtgtagagccctgggaagagtttggctgggagtcagggaagggcccttccagctgggaggtctcaccagagaggcatggagccagcagctcagctatcttcaggccatgttaaaggcaagccttgaagctggccagcccaatgcgtgggcagagaggaatgctgggaaagctatggggttcagggcaacagcactaggatgaactgccccctagaaaggccaccttcccaccatccttggggatgggcaggagccagatggaaaggctgacaagaaaaagagatgtttcaagtattttaaaaaaatggtgcaggaagtaaagagaaagcctgcttgtacatatacaacgctgtggtgtccctgtctccagcaggacaagaaagagctgagaagcaaccagtagcaaggattgtgacacaagggacaaatccagcagcaccaggccttgttagtagctttgaggcatcacagtcccagctacctggccatcgctctcatgctgggaaaaagaaatccagttcctacacacttccaaaaaattagtaaattatttttttaaaaatcaactcattacatttcagtctctatagatctatttaaagatatatttttttctgggctggagagatggctcagcagtcccctctttagaacaaatcatatatatatgatatatatatatcatcaaatttgctactgtggggctggagagatgactcagttgttgggaacactgcctgtttttccagaggatcccaatttgattactacacccacatggtaattcacaactgtttgtaactccagttctatggcatccaataccctcttctggactccaagagcatcaggcatgcttgtggtgcacagacatgcagacacacaacatagccactaggtattactctattaggagtagtagtaataatcatttatccattctaccatatttgttaagtagctactgtgtgctacatatagctgtagacacatggcttacctctcagccctaacaccttagagcaggaactgtgagacaaggcaatgcctatgtcccagtgatacacctcctccaacaaggccacacctattccaacaaggccacacctcctccaacaaggccacacctcctccaacaaggccacacctcctccaacaaggccacacctattccaacaaggccacacctcctccaacaaggccacacctactccaacaaggccacacctactccaacaaggccatatctactccaacaaacccataccacttaatctttctaatccttctcaaacagttctattccctaacaactaagcattcaattatatgaacctctgggggccattcttttttaaacctaagaacataaaagcacaagaatttatgcatacagatttgaaaaacctattacaaaaagctgtttaacagattaaaccaagtaatgtacagaatattatacagatattaaaatgttttatacatgcaaatgatatgctaaagtgctcctgatttaatgctatgttgtatgatcctaaaactacaaaaacatatccatatgtgtacaatattaaaagagagaccattgaaatgggtcagtgcttgaacaagaccctgatatgagtttaagctctggaacacacctctttttgctgggcggtattgagtcagagacaagcaggtctctctgagttcaaggtttgcctggtctacatggtgaattccagagaaatcctgtctctgaaaaacaaaaaccaaaaaaaagaaaaaagtggtggggaagcaatgaataagcaaacaacaacaaaactgcctaagaaagacctgaacagaccacagcaattgatgtgagaatcttgtgctgtcccatccatagacaaagaactacaggcaactcacggatgcccagggtgggagaacagatcttccccagcgaagagcccttggttatctaatattaaatggtcagccctgaaatcatccacatactagccacactaaacaaagcagcaagatgtgtgggaaatataacccatttggaatgaacaatggggattgtttgattgcagaggtgccgatgtgacaagggaactttccctaggcaggtgccgtgtcctgatatggtctaaagggttaaagctgggcctccctgggatcatctgcatgcagtgtccttctcagactcatcatatctggatatgaatctgacaccttcataaaaagggggtctagcattatagcataaccagtaagaagtggttagctcaaccagagtgggtctaccagctatgtgtgtgtcaggaaagatttcagagctggggacacctgctggggggtgaggctggggacagggaggaacagagctgccagtctgagtgaggactggtgttggcgcaggtttgcctggtacagggcctcttcatacaggtttagggtttgtcaaaatctacagtaaccagtctcaggattcacgattgtccaagtcaagtcataaggctggtgtgggtttctggtctctgaatggaggcgtaggctggggggcagcagtacacacagctagtaaaaacagcaaacttcagactgggttaattttagcttgaaagtattggtgcccctatgaactttccattccagcgatgactgtgaattcaggcaatcttcttctggggagaagggattagctggtctcacatgggtgcagtgcacccaggcagtgatcccatccactttaacagctgttggcatgctcagcaaaatgacgtactgttctttccaccggggctccaacacattctggctaaatccgttcatgtagacccagtctccaggttgaaacttgtgtggttccagaacagggtctgcttcatagagggcactcgatttaggccaaacctgctcatgttcatcatctaattctgcaatagctgttgactgaaggttaggtacaataggagcaggaaatatatgatttcaaagggggttaatcccatctggttaggagaattcctcacccgatacagggcaaaggaaaggaatgtcatctagaccctccctgctagtttccatggctaatttggtcaaggtctcttttaatgtaagattcaccttttctgcctgaactgaactttggagtcagtatgcacaatgtgatttccaatctgccccaataaatctcgctacatcctggcttaccttggacacaaatgctagcccattgtctgacctatcatatgatatcttctagcaacttcttagacactacctttgcagtttcagtctttgttggaaatgcctctgtccatcaggagaaggtatccacgaacaccagtaagtacttatagtcatactttcccagtttgattgctgtaaaatcaactttccagtagtcccccagtctcttacctcaaagatgagagcctggatgtttggcagtgttgtgggtgttggttaaatggcaagctttcagcttgacactatattctcaataatacattgcatgaaagtcactttagattgtctcactgcatcagccatccatctcactcccatgtagatgacactatagattttcctgaggatagatcttgccagagaggtgggtagtattagcttaccttctgccgtctgccaccagacctctgaacaccgactcatgggctgattcttggcccatttgatctcttcctccgaatagactgggcattccggcaggttggggtttggcggttctggtagagtcgcagctaacatggaagcagctgtttcctctagggccacctctttggtggctttggcggccaagttgtcacctctagccactgccgttattcctttctgatggcctggacagtgtgattaccactctctttggcagccagagggcttcaagtcattgtagaatttcatctttgtttttgatagtttttccttctgcagttaggagtcctctctcctggtatatagctccatgtacatgagcagctgcaaatgcatactggctatccatacagatgttgacagccagtcctttttccataataagggcctgggatagcaccatcagttccagatattaggaatgatccccttccgtgcttcttgggacatgggatattggcagacccatactgggtctgctcctggcttatgctctacaaatacagggggtcaatgttttaccagccctgtgtctccagtctctgaccaagccttgggaaactctgccagccaggcatccaggtctttttttttgggggggggggaggtggctggtgactcgtacagtctagactcagtctcagaggccacgtcaagtgtcagcacctggactggtttgccgttctagtccattagccagattttcccagggccaaaataaatctgggctctcatttaggctagtagatctctccccaataaggggtatgggcattcaagtatcactataaaggagtgagatacccatctcattcccaagtccactgtcctttgggtagtccctgaatattgtttggcacctatggatccctggacccaggattttttattatacaatgacccttcagcctttccaagcactgaatgttggactccagtatctaccaggaagtctagaggctcccccctccattataagggttacccagggctcagggagggggtccaagccctgactccctccgtcttcctcttcctcagtgaccacggtcttgttttagggctttttctttgggcattctctgacccagtgtcctttctccttacaataggcacattggttcttacctaaggctgataggcatcctcctccaggctctggccaggggtcttctctaggttctctcccttctgcaatgttccagagcttcctctctctctgggttaccattggctagcaggaatctggctagatctctgtgtaatatcttccctgtcttatctttagattccctgttatggaacactttctcctcaacctctgctaaatctctcaatgaatttccccctagtctttctagtttctgtaactttcttccaatgttctggctgactgatttataaatgtcagcaccactatgttagaattctctgtttcctcaggatctaagtgtgtataacagcggaaaccatccataatcctctcgaggaactctgcagggctctcattatctctctgcctgacatcataaactttagccagattcgtgggttgcttggcagttgctctgagacctgccattagagactggcaatagactggaagacactccttacctgtccctgtgttataatcccaagctggtctcctgagggaaaccctcgtcaatatcagcttgattctgagttggagtgccataggcacctggaacgttcttcccggactccaggatgatgcgttctttctcctctgttgtaaagagaatctgcaacaattgctgacaatcatcccaagtgggctgatgggtaaaaaggatggtgtctaagagactaatgagctctttagggttgtcaaagaacctagcatacactcttctccagttgtaaagattagccttagcaaaaggccaatactaatagggtttgtttccctgttcatcaattgggcctgtccctttcaggggtaagatagtggaatctgcctctggtgctacagcctggggcggtgtgttggcatgcctgcttctagtcctgtgagctggacctccctccatctccaaggtggacactattggaacctggggcgctccttctgggggatacatgggcaggagtagagtcaatgtagggatcactggttctgctgcaggaatcctctcgggtggaaacgctggggatggaagtgcctgggcaggtcccctgtacaggggcacaggtggaaactccgggagtgaatatacctgcactggtcctgcccgcatgagtggaaacgcaggaagcagaagcacctgtgcaagtccatgtccaggaacacagtgggaggcggggtctcagccaaagcaggggccgctgcctttgtcagagctggtgcctgagtgtaaggcagtgggaaaatgacttctggcgtagtgtcctgtaaaatgggatagaggggctttgaagacttggagacttcctgcttttgtcttttgccatcagagtggacatgattcctgaaggctaaatatctttggtaagaggcaataggaatgatttcacccaggatagtgggttggcaaccaaatctttccagactacaatgtaggggacttgttctggatgtccctgaaccttctgcaatactttgtcttccaccactagcactgtggagagatagaaagtcccctctagtggccgtcctacttctgaaggtaggccactcggagctgcaatacgtgtnnnnnnnnnnnnnnnnnnnntgctggaggtctctccctaagcacttccaaccgatggtcaggaacctcatccaccctgggacccgaggtcaggaacatcttcctccctcttacagccatgactgcccagcacatctgctttagccacttctttccacttgcactgttacctcaaggctttttcttttctttttttttttttttttaaatatttgtttatttattatatgtaagtacactgtagctgtcctcagacactccagaagagggagtcagatcttgttaaggatggttgtgagccaccatgtggttgctgggatttgaactcctgaccttcggaagagcagtcgggtgctcttacccactgagccatctcaccagccctcaaggctttttctgatgccaaaatatggccagaaagaacagacatgaacaatgaacaatacagaaacactgactttcaccacactggcacgctgactttagactctccggactgcagattccagagatctgctggggaataccattcagaagagcccccaaatgttgtgtcagcaattccacaggacccccaggagatctctaagaaccgctgggcctgatgtaaagaaacaagagtctacttattaatttgagtcagactcggatcgtgaaccttcccactgtgcaggagagaggtgcaacctcaagcctaaaggcttagcatttttatacagaatagtcaggggttctttggattttagggtgacaggcgaggtgacaaggcaagtcatttttcaaacacaatatcatttgttcaggcggcagggcaggatctctcaactgggaaggcgaactcttctgacctgaggagtaactttatggtgctgtcaagaactagtgtgtttttatgactagtcacagctgcctgtgacccctgattaccctccttttatcaaaaagtggggcctaatcccccccccagggatgtttggttttttgtttctttctcaaggacaggcaccagctacacctgggaagtgcttagccatttatcagtgagagtgccagcctcaacaacacggaagcgagggaggttgccatttctctattcgcaagctggcatctgtggctcctcgggggggagggggttcgttagtgggtgcctctctggaatcagggatagcaatattctggtgccagaccgggtcctctctgaacaaccagggaagggaaggaaatctcacgcttgctgcaggaaggagcagaagggaacttctgcgagagaatgcagaagcaggctgcccgtgccaattcaaaatcaaatgtcagaaagatctttgagatgaagacataatatctagatgtggaaatggctttttgaagaggctcttgctgggtcaaaattgtaagttgctgtattttatnnnnnnnnnnnnnnnnnnnnctcgtcaatatcagcttgattctgagttggagtgccataggcacctggaaacgttcttcccggactccaggatgatgcgttctttctcctctgttgtaaagagaatctgcaacaattgctgacaatcatcccaagtcgggtgatgggtagaaaggacggtgtctaagagactaatgagctctttagggttgtcaaagaacctagcatactcccttctccagttgtaaataaagattagccttagcaaaaggccaatactgatggggtttgtttccctgttcatcaattgggcctatccctttcagaggtaagatagtggaatctgcctctggtgctacagcctggggcggtgtgttggcatgcctgcttctagtcctgtgggctggacctccctccatctccaaggtagacactattggaacctggggcgctccttctggggggatacatgggcaggagtagagtcaatgtagggatcattggctctgctgcaggaatcctctcgggtggaaacgctggggatggaagtgcctgggcaggtcccctgtacaggggcacaggtggaaactccgggagtaaatatacctgcactagtcctgcccgcatgagtggaaacgcagggagcagaagcacctgcgcaagtccatgtccaggaacacagtgggagacggggtctcagccaaagcaggggccgctgcctttgtcagagctggtgcctgagtgtaaggcagtgggaaaatgacttctggcgtagtgtcctgtaaaatgggatagaggggctttgaagacttggagacttcctgcttttgtcttttgccatcagagtggacatgattcctgaaggctaagtatctttggtaagaggcaataggaatgatttcacccaggatagtgggttggcaacaaaatcttcccagactacaatgtaggggacttgttctggatgtccctgaaccttctgcaatactttgtcttccaccactagcactgtggagagatagaaagtcccctctagtggccgtcctactctgaaggtaggccactcggagctgcaatacgtgtgcattttcttccaacaagagattgtgagctctggttttcacttccttaaagtgagctaaaacaatgttggggggggggaatgagagttaacccgtcccattgcatccatcaccatccagtataacatgagactaaacactaccagaaacaccactgacaaaaccacatgcacgaaataggcacatcgtgactagaaacaaaagtaaatccaagcactaggactcacagactctcacctcggaaagtagaagtgaggtggatatgggagcagattgctggaggtctctccctaagcacttccaaccaatggtcaggaacctcatccaccctggaccctgggtcaggaacatcttcctccctcttacagccatgactgcccagcgcatctgctttagccacttctttccattgcactgctacctcgaggctttttctgatgccaaaatatggccagaaagaacagacatgaacaatgaacaatacagaaacactgactttcaccacactggtgcgctgactttagactctccggactgcagattccagagatctgctggggaataccattcagaagagcccccaaatgttgtatcagcaattccacaggacccccaggagatctctaagaaccgctgggcctgatgtaaagaaacaagagtctacttattaatttgagtcagactcagatcgtgaaccttcccactgtgcaggagagaggtgcaacctcaagcctaaaaggcttagcatttttatacagaatagtcaggggttctttggattttagggtgacaggggaggtgacaaggcaagtcatttttcaaacacaatatcatttgttcaggcggcaaggcagtatctttcaactgggaaggcgaactcttctgacctgaggagtaactttatggtgctgtcaagaactagtgtgtttttatgactagtcacagctgcctgtgacccctgattaccctccttttatcaaaaagtggggcctaatcccccctcaaggatgtttggttttttgtttctttctcaaggacaggcaccagctacacctgggaagtgtttagccatttatcagtgagagtgccagactcaacaacagggaagcgagggaggttgccatttctctattcgcaagctggcatctgtggctcctcggggggggggggggttcgttagtgggtgcctctctggaatcagggatagcaatattctggtgccagaccgggtcctctctgaacaaccagggaagggaaggaaatctcacgcttgctgcaggaaggagcagaagggaacttctgcgagagaatgcagaagcaggctgcccgtgccaattcaaaatcaaatgtcagaaagatctttgagatgaagacataatatctagatgtggaaatggctttttgaagaggctcttctgggtcaaaattgtaagttctgtattttatccccttggggaaaatggagcctgagaaccctcggctttcatggctagccatattgactttttcacgattcccagaaccttgctttctttccagagattgactattgtgcctcttcaaatcacggatgtcagcatgagtgtgtcaatgcccagacgtctgctctctgccgctgcctgaaaggcttcatgctaaatccagacaggaaaacttgccgaagtaagtaaccctggcccatttctccaaatgttcctctctgttttcccttcttggcagacctttagcatcttgtatttgtaatggatgtttgtgtttattaacatcattctgctcttattttccttttgtgtcagcagaaccttttgtgggacatttttctagagaatgaatagatgaaatctggtcatgagatttgcttagcaactcagtccatacggaagctgttccttgagatgagggtgcccctagaaagggcttgtggaaccttaagggagaaaaaaggctgggcatacagatgtgacatcaaaggagctggtttcttcaagtcttacatagggaacacttgatgacctctgagtgtggggacattaaggttctgttctcgttgattggaaggaaggaggagggtaatgcacttggccactgcagctgctctcaaaggcaacagagcatcagcaggaagggggtgaggaagtccatgtgactcagatgcctgtcacctgaaatactgagaggcatctactccaaaccagacctctaggctacatccctagtatctacagatacatgcatgcatacacacacatacatacatacacatataaacacacacacacacacacacaccagactgttcctgaaggacaccagagtggaagtcctaccaggaagaggtgcttgcctttttacatcatggaatcctcagcgactcagagtgcttagctcgtatgggttgagtagagacttgtggaatagattatgtatgaaggaatgagtgatggagctgctctgagatacgtcatcctggagaaattacagtataaatggaatttcctgatccttgtttgtgatttcctcaccatggcatttgtagaattcactggaatttctgattagtggtatatatatttccttcctttctccttccctccctctgcccctacccctccctctctttctccctccctcccttctttcctccctccctccctctcttgctgttatttgtggtttggcttgttttaagacagactctggctatgtggtacaggctggtctcaacattgcacctatcttcctttaacctctgagggctgggttctcgggtatgcactacaatacatgctaggatgtctccctgtgtgctgcacctgctacttcttcctagccatcatgtgctacatggcaagactgtatcatgcactttttgtgggtcatatgtggaactgaatctagacaagtcccatcctgcttatggcacagactaagttccatactctttctaaaaaatattaaactttatgtggttacagagcccatattttgaaactgagcctctcttacaattcctaccaccaagcctggatacaaacccctgaaacagtcaagtcttaaacgagaacttgaatgaagagattcaaactgtgaagacaaggaggtggagtatttccattagaacacacacacctaacagtatgttggatggccagcttcacagcttagctgctctcttctgctctgctgacaccttttcctagggatgaatgtgtgtggggctgactacactgtaagaaaccggttgccggtggactcctattagtggatgaggggtcttaggagataattagatctggttcagcacaaataggcattatgatatcatgcttcctgtgttactcatggggtagagaatggaaacaaatcgggtatgtagccacggatggagactttgcttgagattctgcatctcttgccagtcctctaagattcccttggcttatacccctccttccacacactgctgggggctcctgaagaggagaggcctctcaggcagccattgcacagatcatcaagagagatgtgctgagagaacagggtgggagacccacgtaaggaccccaaatgggtcctttgctaggctgtggcccctgccagagtccctaacactcatctgcatatgtttgatagtgacggctccatttcctctgcagccgccctgcttttattttttatttatttattttttagatttatttatttattatatgtcagtacactgtagctgtcctcagacacaccagaagagggcatcagatctcattacgggtggttgtgagccaccatgtggttgctgggatttgaacttcggaccttcggaagagcagtcgggtgctcttacccactgagccatctcaccagccccgccnnnnnnnnnnnnnnnnnnnnnnnnnnnnnnnnnnnnnnnnnnnnnnnnnnnnnnnnnnnnnnnnnnnnnnnnnnnnnnnnnntcttctttctcttccttgtccttctcctcctcctcccccctcctcctacctcctccctccttcttctccttctctccctcctcctcccccttccccctcattatattttctgtcatctttgctgtgagcccaggcctagacctctaagatctgtctgtcagagataccattaatgcctgcattcagtcctggattgttgcaggcagctgggagtgggaggaagtgcttatggcctctctagagcattccatgcagagggaagcaaaggaattggcacaaaatctgaggtttataattaggagcctgagatctcaaaaatgttctgagccttagaacttggggccatttacatgtaacaggaggctggtggtgactttcaaatctaataaaataaaatctgtttcaaatgaattcagtatcatctgattaaactgaggaagatactttgaggcagcatcataccggagggaagactcctggccaggtttttgccttcttcctcatctcctgctggagagtgccattgtcaattgcagacattcatcatgaaggtagtggtgcaaagcctggaatgccatcagggtctgaggctgagcaattgcattgtgacccagatgtgggctgtgagattctggattctcatactcacattggagctcatcatagctggaataacatccttaaaagctagtgtgaatttcccagttagttagtctgaggaccagtctaggaactgccattcacatcagctacatcactcgaagagactatctttattgctctagacctggatttccttagtgaggagtttagacattgtgcttcaacatttttaaccttggtgttttttctggaatttctttcctgagtcatctggtatcgtgacttgagtcacgttgaactcttcttgagtcgccttgaactcttcacgaattgatatacatcaaggacattatgtgacaattctggcatgtgtctttggcataccagaccctactaaatgaagttacatccattccacaccctttattctgctcctcagtttatggtttaaccagcagtgcagtacacagaaggcatcaataacctcaccttatttcttggcatctttggtgtctaacagtcctgattcttttttgctgtgtctccagagtgcaaacccatgaaggccaggccttggtagtgttcacatttacattggtacatctagcttagggcctggcccttagctggcaaatgactgactgaatgataattcccagcttgcctcagcaagcagtattcagcagctctttccagggattgtgggaaccctggagcctacccaagtagcctcatacagtctgaatggggggtctttctctccttagggatcaactactgtgcactgaacaaaccaggctgtgagcatgagtgtgtgaacacagaggagggtcactactgccgctgccgtcagggctacaatctggaccccaatggcaagacctgcagccgtgagtgtgccccaggggtgtgggtgctgatggagtggagaccaaccattcaccatcctttgggctcattagcatccatacccttccagagcttctgggtttcctgcaatttataaaccatcaagtgtcactgttagtactacccactccaaatgttgagttgtaatgatcaagagaatccatatgggggctagagagatggatcagtggttaagagcacttgctactcttgtaaaagacccagattctgttcccagcacccacctagtggctcattactgtaacaccatttcaggggattcaacactctctaatctctatggatgccaggtatacatataatacatacatacatacatacatacatacatacataatacatacagacatacatacatacaggcaagattctgatacatataaagtaaataaatctaaacaaaatttaaagagagttaatatatgctaagtacagtggtgtatacttaacagtctcagcactcaggaggctgaggcaaaggatggtgaattcaaaaccggcataggctctagagcaagatgtcatctcaaaaaattagaagagaacaagatgggggttggggatggaaataaataaatgtgtagggtttgtggtggtttgaatatgcttggcccatggaatggcactattaggaagtgtagccttgttagaggaagtgtgtcactttggacatgggctttgagaacctccttctaactgtctggaagccagtattttcctgactgccttctgatcaagatgcagctctctcagctcttctagcaccctgtctgcctggatgctgccaagcttcctgccatgatgaaactaaaccagtcaaattaaatgttgtcctttatagaagttgccttggtatggtgtctcttcacaacagtggaaatccaaactaagacagaaattggtaccagggactgtgttatcgctgtgataggcctgaccacgtttttgtttggagaaatgtggattttgggactttggatttggaatgacatagaatgctttaagaaggaattaataggccattctagtaggactacggaagacattggtattgaggtgatttgaactctggagatcatccttatgatgttttggtgaagaatgttgctgctttttgcctttatccaaacagtctgcctgagactaaggtgaagacatttatatttattgcattgacaaaggaaatctcaaaaaaactccagtatagactctgtcctctggtttactttcatgaagaacattttgatcaagcatagccagcttagaaaggaaaaatacaaaatgtgtggttcaaagagtaaaggggtaccaggaagtagaatgaagctaaactctgtgttcaaggatattaaatggaattaaggaagtggtgacctccatgcaagatcccacccagctaaacgtatatatttgcagttgtatgagggagggttatatcacgttaggtgttattatgacctggttattgtcttcatttggacataaggagatgtgattgtgtatcaaattgacaagggatgggttgtgataactattctcagttttcaacttgattaagatctataatgaaacgcttaggttcaggcatgatggtatactcctttaatcccaggagacaaagacaagcagatctctgagttcatggccagtctagtacagaacaagttcctggtaaaaagaagcttaagtatagctgtggtggcacacacctttaatcccagcattcagaagaccgagtctaagactcttgagttcaaagtctatctacagagcaagttccaggacagccaagcttaggcagtgaggaagttgaaaaagagaaagctggcaatacattaagaaggccatgttcctgccacagcaagcagcagaacttggcagctttgaccatgtgaatctggctttatagtcaagaatagaagagactactgggacaagtgatactggttagctggagctaaaaaattagtggtgattaagaagagattagcatctaggaagtgttttctgagagcacaaagaagctatgttccagagatagatagccaaggttgtaccttgtgttgcaattggacttggtaatgtttaaaaatcacccaggtgatactggttttgaaggcatgaaggggtcatggagagcagctgaggattggcactgtgagaggccatggaaggccattggtgaaggtgcagcttcagatgatccaggactaaaagggtcacacaaagaagttgagccttggcacaataaagagtctatgagaagctattggtcaagtctagttgcagcagaaaatcacagtatattgaagatgccactaccgtgggatgaccaccaagaacagcagcatcagtggagtagaatcaaccagagcctagagttagttctacagaggacagagttggagaagtgagccaagccctttggaggagtccagaagatgatgtgtggatcctagacattggaacaagaatctgtaaagttgaagttgcctgaatatcccaagatgttagagatgtaaaagctatgggacacctgctgaggaaagctgctaacagggagttgagccagcccaagagaaagaagtttgttgctgtcaataaagatgaatagagttggagatttgaagagcaatttgacttcagacatggagacacagagtttggagtttgcccagctggctttttgtcttatttcaggccagtatttcctcactatgatgttttagaatagtatcgtatataatatgatgttggaggtatgtgatctgctttttgattttgaatttataggagattacagttaagtgattaggtgaatctcagaagagactttgaacttcttacattgttgagactattatagactatggggacttttaaagttgaactaattttgtattaagctatggctaggtatgactcacatagattcatgtgttgaacaagcccatgggggttaagacatggaatgtggtggtttgaatatgcttggctcagggagtggcactattggaggtgtggccttgttggagtgttggagtaggtgtgtcactttggatctggactttgagactctcttcctagatgtctggaagccagtcgttttctggctgccttcagataaagatgcagatctctcaggtcctccaacaccctgtctgtcgtgtttcctgccaaaatgaaattgtaagctagcctcaattaaatgttgtcctttataaaagttgccttgatcatggtgtctcttcacagcaattgaaatccaaactaagatagggttgagggtgtaagctaagtcagtaagtagaatggtaactttgcatgcacaaagctattggttagatcccagcaaaaataaagctgggagagccaggtgtggtgatgcatacctttaatcccagcacttggcaggtggatttctgagtttgaggccagcctggtctacagagtgagttccaggacagccaaggctacacagagaaaccctgtctcgaaaaaaaccaacaacaaaaaaataaataaataaaaaataaaataaaataaaaaataaagctggaaggaggcatgggggggcagagaatggagagagagagagaaatgaatgtgtaggctgcttagaatagggctgctagctgctattagtctttgctactaaaagcatttgctaaatcagataggcctgaattcaaatctaagctctgtcacattctatatatgtgatttggacaggttgttctcccagttttgattgcctatttttaaaaattaatagcattgattccccaggtggttgtggggaataattgaggccatttcaatctcgtggtctaatgcctggtttatgataaacataatactagatacaaatatagtccatatcaacaagcctgtgaaagtgactaacggccagtaccaggttgggacaagaagtcagaaggggtagaccttggaaaactttggactacccaggctaatgtgagggggaaacagggcaacatgggaattttgtgaagttgttcctttatttccttctattggacccaccacaagcttagtgacataaacatatgagaactttcagatcttgccagctggatgggcccataacttttttcttttttgaggtacagtcttcacagccccaagccagcagaggctaagagtatgtgggggctgtgatagttaccatgacacactgagagctggggctagtggctacataagaatcatttctttgtgctttgcaaacagtacactatgtactgcttggctctgcaggcaggaggctgagtgagaagcatgcagctgttggacatttggacccttgaatgccaggaagggaagtttcacagttgaagtatgagatacagggccagcctggggggacctcattcttctctgtcttcagagggagggaaatgtggctttctaagcatgatcccagaagtcaagggggttttgaatgaagaggttgaagcaaaagtcagcactgggctgtacactttcttctgactgtcactgggtcctgagctgaggggaaggagaaggagatctttgttcaacaagaagatgcctggctaatggaggtgccaaatcctgccttcttctcagcatgtataggtttggcttgccactggccctggtagtaatctgcaacttcactgagtctaccttaggcattaaagcatccttgacttcctgactctcccagcatgccttgggaaatctagaagttcagatgtgagcccagaagagatgggggtctttataagatttgtcaatatttagaaaatataaaccaagctgtttctgcccagaagtcctcagggaaactcatggggttcttagagagccccaagcaagacggcagccaacccttctgaggtactcattccatgttggcacagttgtgagcatcttcaacaccctagctctcacatgcttcccaacagttgggcctggtaaatggcagttcaggatatgagcatgagcattcggctcctgagactctgaaagagtttccagtaggtttgcctgccagtagactgttgcagaaggcactagtcctcagccatgcagagtgaaaaggcttacttcagtgggctgtcgtgaagtcctcagtgtctgtccagctgatgggggttacattttctccattcagtaaatctgtgaggcagcccatgggactctacgtgggagctagccaccatagctgtgtgttccctggctttccactctccctgcccaagcaccagctgtatggtgtttaggtgccagaagaggccacacaggcagctgaggcttttgtttcttctctaaatctggatgtcctgattaagagaggttttttttttgtttgttttttgtttttcttttaattgacttttttattttcaaatagaaatgaattacacaataattctgcttgtcttatgccagcccctggagggcttttagatggatcatctcctctgactttgactgcattataccagaaagtaaccaccaggtatctaagggggaggtctcggttctacatcagaacctgggtaagagtggaggtgtgacagtgtgcactgtgatcgcagcactggaaacagaacagtggaggcttggacatttttttttcaaaacctattttagtaaaggttcttaaatgtttcaacttcccctctagcccaccaaccaaaggtaggggagaagaaaggttactaggaaatgggagatgtggacctgtttagaagtagttcttttgggtgattccaaacattaatcagtagcagctgttcagtccagaagaaaccacaaggctctgtcgaatcagcacaagtcctctagagtgtcaggaagcagctggaataccatgagaagttctttggttcttttctctctatgaagtcatgacaagtaaaggtcagaaggtcagctaagacctgcaaactgttacaaggtgaactgatgcaaaaatctgttgggctctttccaaacatcacagtgtcctcttgtgtgtctgcttcaacgaaacatactctcataagacagcttccagaaaaaaatatcacatgacacaactgagtttccaaataaaccgggaatttccacttcagaaaggctcctgttagccagccttgtgtgaacaaacagagtcaagggaggcatagaaaagaaagggactgctatcacccctgggtaaggaggtcacagcacagagaggctaagtgtgactcacacccacagctaggacatgggaatcagccctgtcttagtttgcttctctgctactgggataaactctatgaccaaaagcagtttggagagaacacagtttgtttcagtttacacttccaggtaacaatttatgactgagggacctcaaggcaggaactgagccagagaccacagaggaacgctggtaccgccttgcatccaggttcatattcagcttgctttcttataccactcaggactaccttctctggggtggcaccattcacagtgggcatcaatcaaatcaaggacatgccacacactcccacagcccactttgggggaggcaattcctcaactgagactttctcatctcaagggactctaggtttgtatgactgacatggagcaaggctgatatctcagcaagcatagctctttccctgtggctgctgttgctgccagaaaggctttgcttagccttgctcaatggtgtgttggcacctcggtccctttatgttttcatattttgtgaccattgcaggggtggaccactgtgcacagcaggaccatggctgtgagcagctgtgcctgaacacagaggagtcctttgtctgccagtgctcagaaggcttccttattaatgatgacctcaagacctgctccagtgagttcccctttcacctctctatgggaagggttcccaacagaagtgcttgtatagacaatgcagagaacagcatgttctcctctgcccttttttctcccccagggagactaaggggaaatcttctgggggccgcatgctttcaatggcaataaataaacagttacttgattcccatcatagccatgaaggcttgctgagacaggctcagggacctcacttggctttggtctttcaggggcagattactgcttgctgagcaaccatggttgtgaatactcctgcgtcaacacagacaaatcctttgcctgccaatgtcctgagggtcatgtgctccgaagcgatgggaagacctgtgcaagtgagtttcattacacttaagatcctgggacagacaggctcagcacaagccctcacgggtgccagtgagttgatgacactggcatgtacctgtgcatcctccttcagacttcactgggcccctggtgatgtgtgtgcctatatcttgaagccactggtgttcctgcccaaaactccttcccacgctcctggaaatggctctgctatctccatgccctgccttgttagcattaagaaacagtccctcatttttggtgtgctgcagtggtttgagttgtggtttgttcaaagttatgttcaaatttagttgctattatgatacgtttgaaacatggcagttttccaaggtgattgtgttggtgggaagggttaactctcgtgggagttggctgattacagagaatgagcaattatagtgtgggatcaatccctctgtccccacctcttgtacataagtcctcactgtgctttcctacagtgagatgaagcaggatgaagtcctaacttcttatgcttctattcttccttgtcactctatccatgtgctgtgatagaactccagagcacagactaagacatactctcagctctacccctagccagtcaaacctgggacccacaatacagagacttgctgactgcaagctggctgcatgccaggtgcttagcactgtgctaagcccatgctatcacactccaaggacagatggattggctgcagctcagactcagggaagagtccaagatggctcttgtcttagtcagggtttctattcctgaacaaacatcatgaccaagaagcaagttggggaggaaagggcttattcggcttacacttccatactgctcttcatcaccaaggaagtcaggactggaactcaagcaggtctggaagcaggagctgatgcagaggccatggagggatgctctttactggcttgcctccactggcttgctcagcctgctctcttatagaacccaagactaccagcccagggatggtcccacccacaagggccctttcccccttgaccattaattgagaaaatgccttgcagcgggatctcatggaggcatttccccaactgaagctcctttctctgtaataactccagcctgtgtcaagttgacacaaaactagccagtacagccctctactaagtagggtctcagtctgtgtgggagctcagttagctctgaaaggcagatgtctgagaaaacttttgccttccctgagccctgtcaccttagcacaaggccagattggcagtgatattatccaggtatctagctttacttgtagctggctttaactcctttctccatttaaacaaacaacctaacgataaaattccaggctgcatcacttcttggccttttggctaagatcaagtgtaaaattccaggatgtttcactgggcagtggtgataaatgctttaatcccagcatcaggaggcagaggcaggaggatctccatgagtttgaggccagcctggtctacagagccagttccaggacggccagggcaacgcaaataaactttgtcatgaaaagccaaaaaacaaaacagaaacaaaaacaaacaaacaaaaccattctctcatcttccactaaagaatgctgtgctttctgcccaatgctactatttccacatagaacaaaatgaagaactaagaaccgtctgagagaaagggtaaaaatggaagcaaagacgatactttgctttccctggctcctgcctttctcattatcagaccgagttccttggccagtggcacaactgaagatgcagcagtcatcctccccctgcctgtgttgtcagttcatgttgacagctgccctgccatccctgtgcttcctgtgagaaacacttgccctctttggaatggattcttggaccttggcaagtgggctatccatgttgctgcttgcttgtcgatctctgcccagctgcctcacagactgctgctgcagccaattctaatagggcccgggcactgggggtgtggaaaaagggtgggtatgttaaataccatctatacttgcctgccttctaaagccggatgtgagggggttatgggttttttccctcatttgttttccttgctctgataagcaagagccgagggtgagatgctcgcaggactgcttggtcctcccgccctcgcctaaccaggcttttgctttcactgtccttaaaccttgcctgttttcacagttaaagtgtgtttgtaactaagggaatggtgtcattgtctatgtgagtttaagcccaacaagggtctaaataaagagccaacatcaaatacaagtgagctttatgtctggttgggcggtactgagaacctgtgaggtaacctgatgggttaccacatacctcagaactcacggggcagaagcattttacccggcagagccgttcccctaattgaagactttctgtctgctctcaagtgattcagtgcagctgctccatcctgtaatcaaagcctgagttttcactgtagtcacagctaatggggtgaggatgactgtaccccagccccatgccagatggtacagagccagataacatgactgtaccattttagtaaagtctggtggactttactaaagtaagcccaggtctgccagaccttgctcaacacacaaggggttcctcagcctttatttagactgttgacaacaaatggtcagaagagcctatcactcattctggaaggtgctgaagtatagaactaagtccaagttcctgggtcaaagcaggtactgactggcatgacgcctaccctctcttcctctcagtcctctgatgccagattctagctatacagtttgggagtgagctggggtgggggtgggggtgggggaataaggaggtttcttctcccagccacagctcaggggcctctttccctcactagaatgcctttcccttaaatgcaacttgcacaaatcagcaccgtgccaaacaagactccacaggcacagtacaaatggagtgctcagcccgcagtcttcaagaccttgggagttgagtcagagtcagaggccaggtcttacctggtgttcccagggcccagtctagcaaagtgagatgaatgggttagcagtgaacagagaccatctaggtctcctttaactccactccaccctgtcacctgtaatgaatccctattgcctcccgggggtggggggggatcactaacaatccttgactagcagtgtgggagagcccctgttccacctatgcttcagctagcccctcccacctatgcttcagctagcccctcccacctatgcttcagctagcccctcccacctatgcttcagctagcccctcccaccttgcgtacagaaacccagtctatcaccagagtcagccccatgtacagaaacatatattcagagacatgttttaaaatgtgtagtggaccttaaaccatatggctcccctgttagttaaggtctcactcctcagctttagcctgttgttcaccaagagacccaaagagacccctgtattgctgtctggagacctctcgctcagggacaggcccgggcacactctccttgcaggccagagagagataccctcctccagaagttagcaagctcaggattcacacactgtcctgagagaagcccttctttccagctgtggaggacactgcttgtacaggagccagagccttgaagcttctgggatccaactggccatactcccagtccatctatcacaggctaacatgaaaaacctcttcagcctcaatggcctgcccctgtcccaccccaagcctagttgtctaagtctgctctgaaagccatggcaaaataccacagactgcatattgttttctaaccacagaaatgtctttctcatagtactagaggctagatgtctgaatgcagggcgctagcatggtaatgctctggtgaaggctttcccccaccaatggcgtgtccactcatgaaggaagagagatggagagacagggagtgaatgaatgagctctttggtgtctttttaaataaaaacactagtcctggactgtcaagatgactcagtaaagtgcctgcctcggcagcctggtgagctgtttaagcctgagagtgcacataaagataggagagaactgactccagaaagttgttctctgacctctagattgcacgatagcacatcagctccccatcacatcatatacccttgatgatgatgatgatgatgaagaggaggaggaggatagtgacggtgatagtggtgatggtaataatgatgatgatgatgatggtggtggtggtggtaatggtggtgatggtgatgactagagtggtgatatatggatgcttcttagtttaagaaaaagcttctacaggggcaccaacaggtcagctgcccccactgaaaccatcatgccagctgttgaccttggtcaggcaccttcttggcaaactacccctatgaccatctcctcctaaggtcagttgcatttcaattacattgtatgtggagttcaaaaccagaccagagtcactatctgtcattgttgacagtctgactacactggacacactaccccacaattcctgaaactcccaccccacacacaccgcctggtttataacttagatgtgggaagcacagtttgtgtcaatatacatgtacctcaacaacctagctatgcggctcagccttgagtcatcctggtcacagagggcagagcctgttcacagtgaggccttagttaaatgaaggggaaggcatgtctttgagtgggagatgtttttgtcctgcttcctgggacttcttaaagcttctaccctgttctgctttagcattgattggtaactgagtctggttcatcttcttgtctgggcagagtcttaatatctgcttcagcacatgttccttggcccatctcctctcccgtgtctgcctgtagtgcacgaggtgctggtggtccctgggactgacctaattcagtttcttccccagcagtggttagggttcctctggaagaagtacttaagatgtgtcagtcagtctgcatggtagccaccgggatgtgggcagaacggccacaagagcatggagtagggagtcccaggtctcaggaaagatgttaaatttgatgctagacactcaatcaggggagccagccacaggtacaacccacgagcttccctgacacaggtggacagcagcagtgcaggtgcatggtccagatgggccagagggaggtcaatgccagagggagtcacaggagcaggtgggacctgtcacctgtagcacagggtgacaggaaactttctggagcttaccttgagccaactattaatttgtcttccaagaatcttaccagactggctagccccatagagttgggagggaaacacagaggggatgaatctgtgaactactgggttcagtacagctaagacaagtcacctcttcagtttaaggagccttgagacagtcacttctgctcactggccatcagtttcctcatctctaaagtggggttggaccagcatacttccaaggcctgttttagcctctaaatatggatagaagtgggcataggtcattgttccacaaatgcttgctaaacaagtacagtcctgcctggagtgtacactatttctgcaggccggtggcaagttagagatggtgacttaaaggacacactcaagtacattcccatagcagagtatcatcggccctgagagaagctgaggccaagatgccttccagagtgggtgggcaggtaggactagcctccctgagcaggaaatgagttcagagcacacttagcattctgtctcttatggcatatggtccttggaattcctgtgacctcacacaccctctgcatgcagaaagtgggcagtgtgagaagtgagaagtgttctataaggctaccttagaggaaaggtggggagcccgggagtggggagccctgcagtaataaagtccacatcataggatctggtggacattctcaatgaaaattctaggtagagagtgttgggagtcacgggacctttgaaacctcaaatcttagcaccagtgatacacttcctctaacaagaccatacattccaatccttctaatcctttcaaatggtatcactccttgatcactaagctttcatatataagagcctatgaggaatattctttttcaaactaccagattccacttcctggcccccataggcctatagccatgtcatagtacaaaactgtttcatgtagttttaaatttgctactgcctttgcccaggatcagccaagctaccagcccctcctgtcttcccttttgctttgcccacctttggttccaggaggtaatcatgctaccagctctttctcagcttccctgaatcctcggataaaagacacagacacagtttgttactttacaatttgccttcttggaacagatatctccctcctggaaaagcatgtccttatcaatttattatctctgtctctccacctgccctaaacttaatggctagtcccatctggcccctgtcaaacatccttggccacccacctgtagtggaggccacaagccccagctttccccaagacctcacatgattgctacattcttctttctccaaagcatggcagaaagccctctctctttcctgtgcctcctttttcctcaaagtaccacctataccttcaacccagctttcttttttttttctcttttttttactgtacattttttaaaaatttgttccaaatcatttgttttctacaaaatcatgcaactctctttttttaacagttttttattttatttatttttttattagatattttcttcatttacatttcaaatgctatcccaaaagtcccctatgccctcccccgaccctgctccccaacccacccactcccgattcctggccctagcattctcctgtactggggcatatgatcttcacaagaccaacggcttctcctcccattgatggcctactaggtaaaactctgctacatagtcaactagaaacacaagctctgaggggtactgtttagttcagatttcaacccagctttctttactggccaatcaagaaccacttggggaacaagacctttctattagaaactctccttacataaaatgcattcaggccaacttcaaaagtttccatcgtctatcacagtttcaaaactgtttaaaagtccaatgttcaaaatctcttctgagactcaaggcactctcttaagagttacagttggggggagggtataggggactttcgtgatagcatttgaaatgtaaatgaagaaaatatctaataaaaattttgtttaaaattaaaaaagaaaattaatgtggtacataattttgagaaataccatatctatggaaaatatacaattaaaggaaaattttaaatgtggaaaaatataaaatcaaaataagaaacagatcacatactttgagcatccaatgacatggggtgtacattagcattccagaagtaaggaaagggagcatggcgaggcaatactggaccaatgcaagactgaaaaccagctgggcaagctcctctgcacccccatgtctaacagctaggatccccaacttctttcatgtttctctgtcttggcctggatccacatctcatctgcagcttttcttgacaggtatctcacaattccagcatctccaacatactggagtttccagcacagtccagcttcacacaatgacatctctgggcctcgtgcagggacttttcttttgctgagaagggagtgtccacaacccctttcatgtatccttgccactatagcagaatcttgtaactaaagctgctaattctgctgcttgctagagctgggcctcaccccctccttcagttacatttgcatcacctttctgctgttggcagcttccatcacacagaagccttccttcattactattcaaaaattgggagtgtagcgcatagggtcttgccctgaggtcaccactctcatttagcatcaggctcttctttaaactttttatctcgttgtgcagtgaactccattatactttttggtgctccttttatcctcaagctgtacattttgcatttttctctgcctagcttactctttttcacatagatctgcataaaagtggttactaacaactacatgacacagtcaatactagcctgtcttgaaatctctgctgacaccataacaaaactcttcaatttagcctcagatagatttttaggatgagggcaaaaagcagccacactccttaccacaatatcacaagaatgtctctaacccacttactactcttcttttcgtcaaacccagctgtcataatctacactgctcccagcaccaccattagttaggcccctgccaaaacattcaactgctttcctaattcagagtcctaaagtctacattctgccatcaagcagtggtcaggctgcttacagtaattactctgacgactgttttagtcacttttctattgctatgaagggacaacatgaccaaggcagctcttataaaagaaagcatttaattggggtctggcttacactttcaaagttttaatcctttgttatcatcacagcagagaacatgacagcatgcacataggtgctggaacagtagctgagagtgacacactgacacactgacccagagatagaaagaaaaagagacagatagacagagacagacagacagactgactgactgactctggccttaccttggacttttgaatcctcaaaacacacctccaagtgacacacttcctccaacaaagccatacctcctatgtttcgaacaacaccactcctggtatctaagcattcaaatctgtaagcctgtaggggacattctttttcaaatcaccacaattacatagggaagttcctatacataaagatatgtaaagctgtgtaatgttccattgcatttggtcagtcccgtttctggacactttggttgactctcacttttcacctctacaaacagtaatgtagtcagtaacttgaaagcacatccctttacatagtgcaagggtatctgcagaagggaatccctacatgaagttgctgagtgcattctgtaactttcatagacatgtgtgccctttagtacagttgactttggaagctgtatgtgttttccctttagcagtcatctgtagacgtctcctatgactgactgagcatcacccatcctgttctggatcagataccctgaagggatgaaaagaaaagcttataaactcttacttactttaaagcatgtacattgtaacagttccaagagaactgaggagctgggctggaggctgccgccatatagccaagtataagaacacgagcctatgggcacagggcttctccctggctgtcctgacctctgataaagaaaagcagtgccatctgacagacatgggcttgggaaacttgagctcagtcgcctgtatctccattgaggaaaaccctgtagtcttcaagactacaggactgggtttaggaagtcccaggcagaagagtgtgatcagaaagtccactttggattagggcttggtgatattggcctgagcacttttgctattttattaccttggaaaatggagtattcttataaatgcatgaaaaaggaaatttcccctctgtgccaacaagctgtctgtgctgtgtgccacttagtggtacttttaactctgtgaggaactacccagccacagggaattattctgcattaataatgagtccagaatgtgtccagagaagtgagtcacacccagagcaaaccggagcaccaacctctgcttagaatctcctctgcagttaaatgtccagcctacatcatttccccattgctcaaacattctggcagtgttcctgcccaaagaaaggcaaaattccctttgtgtctgaaagcttagcagatggtgatgctgtgtagttgggaaaagttatggaattcattatcaaaaaatttttaatctggttcctccatttattagcaagtggtcttggcgagctgtaataagccttcctcgactttaatttctcttgctagtaaatgagaataatattggatcccttaactagcctacaggatatatttctgaggacttcccttgtctaaaaaatgttgcaatgatgcttaacaaaaacaaagttgatgggttcttcctgttgtaacccctgccaagccccttttccactttggtgcacacccactgttgaaatcctgttcactgtctaaaaggcttagttagctttcagttaactgtatggttctcataaactcttactgttccccgatggagctgaagagataactcaacagttaagaacactggctgctctttcaggggtcctgagttcaattcccagaaaccacatggtgactcacaaccatctgtaatgaggtctgatgccctcttctgacatgcaggttacatgcagcagagagcactcgaaaataaaacaaacaaacaaataaaatgcagcagagcactcatgcactaaattaattaattaattaattaattaattaattatttaaaatgtcactgccacccagccctataaaataatatgctacattcaggagctcagtgtggtgatctcagagttatctctgactcttgtcctaaccatgtgacggtggactcttcatttcaagtgttggaaaggacagaagttgacacaaaattgtccttcagatgaactttactaggagagatcttcatgatcatgagcagctgcgatcaggccgtgacatgggagaccagtagcaggcacagccacaccagagtaaagaagctagtgagaaagagtcctggattctaaagaacgaaggccatccggatccggcgttgtcagtggaggtggccagatccataccatgtgatctgcctggcactgactgaagtgtcttcaagggttgtctgtggtctaggcttgctcacagctgcaagagggaagagagaactcccaggaagacaggcttcagggaggtgcggcctgatttctggaagggggagaaagacagctagaagatctgtgctctaacatcaatctaccggcaaatcttataggctctaccatcggaacataggcagtctgaccacatgatccactgtgttctgggccagcaggatcactgcagtaggctatatctgtttcctgtgttccttccctgcattcacagctttctgtgctttcacaacacagccaggctaggggattctcctgctcaaaacattctatgactgcccttctccctcagacatgtcctgcctatgtgccctcatgttgtgtcctgcctacccccaccctgctgggctctttgcctttcctgaaacatggcgaacatgttcttggcatcttcatcgtgcatctagtcatccttctcatccagacacttcctcagacaccagcactactcacctcctctccatctccagggctctgctccttagcagacactataaggtgtcaaactccaacccacttggcccctttgaccatatatatatatatatatatatatatatatatatatatatatatatatggttatatatatattggttgttctgtccttagtgtctagtcaatgtctggcccacagcaagaactcacaacacatttgctgattatctaggtgtgttgaagcttaccttagtgctcaggctaaagcgtaagatcatgagttcaaggccaacctgggctacatggtggtagcctaacttgaaaaaaaacaacaaaaagctttgctgcctttgaataaacgaatgaataggtcaagtgttctacgtgcatatgtagatccacaggaaagttggtgttagacttattctcttttagtcttagctatttacatctccctttggaaactgtctttttctgttttctttccccctggagctgtatgttttgctttatgtatgtcctttttatatattaggaaatttttgctcatagacactttctatcctgaaatgaactctgtgagaaaagacaccgttttcatttaagatgtctggaatgtcttttagaaatgaataggtcaccattcatttatctatgaataattttcttccatttttgtaattctaaccagaactggactcttgtgctttgggggaccatggttgtgaacattcatgtgtaagcagtgaagactctttcgtgtgtcagtgctttgaggggtacattcttcgtgacgatgggaagacctgcagaagtaagtttactagagctaattcatacagccatgcctaattcacactgcaggcttaatgtgagccaactactctcaacagctaataccacacaatcaaatgtcatgcagggtccttggtgggatcctgaaacagaagaggggtgctatgtaataatgaagtaactacgtataattataggttttactaaataataatttgtcaagccaggtgtagtggtacttgctttgcttcccattactcaggacacagaggtaggtggatctctgtgcattcaagccctgtctggtctacacagcaagttctaggcttccttacatagtgacaccctctctcaatgacagcaacacactaagctaggcctggtgagctggtggtgtactcctatcctcctagctacttagagtgctggagagatggcttagtgattaagaatacttgggtccttccagaggatatgaattcagttcctagcatccatatcaggcagcttacaggctcctgtaactccagctccaggggatctgaccccctctcctggcttttgcaggcaactacatgcatgtacacatatccatacacagacacgtaagtaaaaatataagtaaataaatggactaaggatgtagcttcgtggttagagcacttgccaagcatacataaggctctgggttctgtccctaaaactccaacgacaacaataacaatcaaagcgcagtgtgcacgactgggcgaatggatctttgtcagtcctcttctctgacttctcaaaactcttcccaaagagctgtgaaggaaagatgagtacctggagtcgttactctcatttcagacgggaaagctaagtttctaagaggtttcgtgattttcctaaatagtagattatgccactgacaaaggtaagatcagctcccagtgctagcaatttaaaaccaagctttcccctatgtaaccttaccaacaacaccttctcgtgacaccagaagctatgcctgcagaccgctggggctggattgcatcctgagacactgaagttggtgctggagagtggaggtggctatggcagtgggaatgtttgaagacggaagtcaatccagagccaccagacttcatccagcttcaccttcctactcaaggagcagtccagagcccaagatgaatggatcttccagggggagtccacgtagactttttgttgatgcagttgttttaatcaccgtactctcctcagggaaagatgtctgccaggatgttaaccatggatgtgagcacctttgtgtgaacagtggcgaatcatacgtctgcaagtgtctggaggggttcaggctggctgaggatgggaagcgctgcaggagtaagtagctcaaggtctgcatatggaactgggcacagctcttcactggatcctcacattctacctctgtagaattcgtaaccacgttacaaactcacatcccacctgtgggtgctctgaaggtgtttccaagggatcaagtgagctgactctgggctcttcaggaatttctcagtggcagtcctaagttgtcaggcttctgttctgtttcctcccagcacttgcatggtggttgggtagctgtacagggcctaatttagtgcctagcaagctgatgggaaaatctagaatcattggtagcaattgactaccagggccaaaaagataatttcagctctttttcttcttggcagaccatatatgtaaggtaggagaagggccggagggaggttctgtggggttttgagaggggaaagaaacccaaactaacaacaaaagaagacttaccatttgcttccctagaccaggtttctcaagcagagtttcattagaaagctccggagggatctcagagatggctcagttggtaaagagcttgctgtgtaggcatgaggacccaaggtccatccccagtgctgtgtaaaagaaagcatggtagagtacacctatcacctcagtgtggggaggcaaataccagagaatcccagacacttgctggccagccaatttagttgatttggtgagctacagcctcagagagagaccttgtctcaaaaaataaagtggatagtgactgaggaagacattgacttctgacccccacaagcacaaacatgagtgcccacagatagtcacatatacgcatgctaggattctccagaaaagtggataacagcgtttatgtggcagaggaacacgtacatacatgttgtagataaaggaagaaagggggagaaaagaaagagaaattgactttaaggaattggctcatgaaattgtgagggctcgtgaggaggacgtctctttgcctgctctgaaggccttcatgtgactagatgaggcccacacacacttgggaaggcagtcggctttactcagaatctgctgatttaaatgttagcctcacgtacaaggtacagaaacttctagacctgtgcttgacaaaaaaacaaaaacaaaaacaaaaacaaaaacaaaaaaacaacccaaaaagcgggcaccatcaccagttaaagtttacataaaattagcagttatgctactcaagaaagagcagctcagtcaagtggggatttgaatataggtatagactttcttccctttctagatgatagttctctttaaggggtgggggttgataatatctatatggttttctgactctactgtagtggatagaatggtcctttcttggttaaacacagcaagttcattttgttttgaggttgctttgtggcagtttcctcacagactccttgagagcatggggcattgcacatgtcagcaaagctgagtagagaactattggcaccattcttctctgggagcagggcttgtgtctagagagaggctctgatgtgaatgagtgcattggggccctggctggcctctgccagccttcctgcaccatctgaccttctagctgaacactgcagtccttctttcatagagctcatgctttggtcctgtccacatgtctggatgagccaatttttctattcatttaacatatttatcagtcaataccttgaacaggtggatacgaggcaatatttctagccttacaattttatccctaaattaaatcccacagtttccaccttcctagtggtatctctagttacagattataatttcatgtaaggtttctccttttaaagggtagacagaggctcaggggtgtcatacaatcagaaagtgaagactcagggaaatgtgccccaactgggcaatcctctggccagacaaccttgtacaactcagtcagatacatggcatccatagctttatttattctctgtatgtacctagccacgccccaagggtgttgttaggattaaagggtcattaactacttcaaaaagctcaaattacctaacccatgagaaatgctcattatacaaccagcatggggtatctgggatcgctactaagaaatatgaagctaacacctatatagccattctaaaatcaaatggcaaatccaccaggtccagtagggtcaaaagagctctgacgggaactgccccttgacctcagcctattttggcacagactgcaaaggcaatcattttagcaatgatatgtctttaagatggatcacttccttaccatatcctgacgtgactgctcttgatagcttctttctacaataatgggttgttcatctccccacattttccctagggaagaatgtctgcaagtcaacccagcatggctgtgagcacatgtgtgtgaacaatgggaactcctatctgtgcaggtgctcagagggctttgtcctagctgaggatggaaagcactgcaagagtaagtgaccaaaactggctcgctgcttccatttagttttggagcaatggctttttggagcattttcaggcaatagactccttagctctccttctgccatagatgtatatgcggacagcaacaacagccgccagaacacctttgatttagtagatagtaaatagactgtttctgttctgtatgcaaagagtatatagaggatagcagcttgtgaattactccagtacccctgaaatatgctggagagacacatgcatggcatctgagtcttttctgatttcctttctatgatgaatcaatagattgagtaatgaagacaagcatttaatgaagaaagagaaaccctggggctggagagttagctcagtgcttaagaacactatctgttctttcaaagaacctgggttcaattcccaacatccatatggtacctcacagctatctgtgggtccagttccagaagatctgagacatatacaagcaggcagaacgctcatacacataaaacaaaataaaatttaaaaagagagaactcaacccctaactatccccctacacacacacacacacacacacacacacacacacacgcactcacattagcattttctgctggccaggcatagaagtaattttgcatatatatgcctttacttgctctattttttactttactttgaaaggttagacagctgcttgatctatataaaaagagaatattataataacatactgtagactgtttgaaataagatcatccatttggaattggtacaattctcttatgcagccctacatacaaagtctcttagcatctaaattgcctatgtatttatataaagtttgtctttttactgttaaccatctaagttttccaaaaatctctttttaaagttacattctttaagtcttaataggtcagtagagtactgacctagtaagtactactagtagtactgtgctaccaaatagatactactaggttcttttattctatcagaattaatatacataatacctattgtgtgtcaaacattatgggcctcaaaataaaagatacttagtatgtattgaaggagaatttagactaagaaagacacattgtttttgattgttctgttttgttaagattttatttatttactttatatatatgatgagtacactgtagctgtcttcagacacaccagaagagggcatcagattccattacagatggttgtgagccaccatgtggttgctgggaattgaactcaggacctctggaagaacagtcagtgctcttaaccactgaggcatatctccagcccaacacattgttaaataattatctcaccgcatgggtacagcatagggtacattggatttaagcaaaatggcatttgacactttgtgttagtcattatcataatcctgctggtgtccactgacttgcacaaagcagatgctcaatacattgactttggttgaataaattaatgtgttaggatattcagagagtagctgacacagctgggttactgtgtaagcttcttgaaagaggaaatggctgaggagaaactaagcatatcttcttctgtcagtcaaaacattagcactcatgtatctgagcctccagcaataaagcaaaaggaactgccaaggtctagcctaatccagtggttctcaacctgtgggtcatgactcctgtaagggttgacagaaccttataatcacagcagtagcaacattacagttttgaatatagttttatggttgggggtcaacacaacctgaggaactgtattaaagggtcacgtcattaagaaggttgaggaccactggtctaatcctttactgtactctgtgcacagtaaaggtcttgctgccagtaatcagtgtgtgatttcctttacaacgtgtgtatactgtgtagcttatttagggaaattactggtgttagtaattgggaactcacaaatagaagagtatctgggaaaatggtaattgtgatatccccacctgcctatcctgtgtactagctgaagaacaaaaacccggctctctaagttcacctatgcctcctgctgaagtatgcttttttatcctttgtatacacatgttctctaactttttaaccatgtgacctttcctttcattcctataggatgcactgaaggcccaattgacctggtctttgtgattgatggatccaagagccttggagaagagaactttgagactgtgaagcactttgtcactggaatcatagattccttggcagtttcccccaaagctgctcgtgtggggctgctgcagtattccacacaggtccgaacagagtttaccctgaggggcttcagctcagccaaggaaatgaagaaagccgtgacccacatgaaatacatgggcaaaggctctatgactgggctggccctgaaacacatgtttgagagaagttttacccaagtagaaggggccaggcccccctccacgcaggtacccagagtagccatcgtgttcaccgacggacgggctcaggatgatgtctctgagtgggccagtaaagccaaggccaatggtaaaatgggatggaggtgtggtttatattactcaaagtttgggtcttttagattcacagctggtcttaatgattgagcaaccaataattgttggctaagccattaaaaatacaccttggcaatactgccacctacaggccataatgggaccctggtgataactaaataaaatggcctcacagcctgggtaatcggatttaccacctagtgtgtgaagttcagtagagataatcacctcagcaagtgttatttaactacaacatacaagtgttttaatgccctggtatgtttcctccagagtcacctgaagaatttttttaaagatggatttctggtggcaactttactgacacttttaactttttttatttttattttcacatgcattggtgttttgcctacatgtgtgtctctatgagggtgtgaggtcccctagaaatgaagttaggcacagcttttatctaccatatgggtgtgggaattgaacccagatcttctggaagagcagcacctaaccactaaaacatcacccggaaccaagactctttaaaaaaaaaatggagaagaggaggaagagggagggagggattggggagtaagggggaagaaggggatggggtgggggaagagagannnnnnnnnnnnnnnnnnnnttcacgctgacctgaaacactcgatgtagcacagaacagcttcaaactcattgcctcagcctccctagtacttgaactacaagcatgaatagatttttgatcaagtctttaagtgaatattctgaagtcatgaagtctttggatagagacctatgttggcagaaacctggcttttgaaaagaacaaagttgaatgggtccaagttcctattgctccgcaaagctcaactctttctctggggttttcctgactttgtgtattctacagggagggtctgaaggatgactttatttgcatagatgtggaagagtgtggcctttgattcatgagaggccaaaagccaggatgggtgttggagctagttcatgatgattatatatggatttcatctggtgcgatgagaagactcaaggtcgtaaagcagcctgcttccaagccaacctccttcaagtactgaaggcgcattgctaagaagaagaatgcacgcagtcccatgggagattctctagaatctgtgcctaaatgggcccagatgtagatgactgacagttgctcagtctataaaaaacaggagtactcttggatctattagcaaactccatcctccctcacaaaattgctgatggtttccaaaccatttttttttaatgaaagagtccattttataggcttttcttacctcagtgttcagtctttccctgaccaagagtgagggagcctttagagttgtctatccccaggatcgcctgatcttagtagtttataaaaccggttgttcactctagactagcttgctagagctcaagtataacccataagccctggtagactgcattcttaaaaagtactaggcaagagtcttttcctcccaaaacagtaattgtccttttattagattcattgaaactaacccaccttacatttccacattcaaattgcttcaaattgcccaacgacagctagtaaaagcagattatttagttcttgaatcagccaggcttatccaaaatgacatcctcttaatgaattcagtttctctgggcgaaactaaatatgaccttgaacaagcagtttccctcttgggaatgctcctttgaaatttcaggaagatattttaagtttcttctttatcctgactgggaattccagtggtctgcagactcacctctttatcttttcatttctgttcaagacaatgccccaccccacccatccattcaagaaaggtgggcagaaggcagctccatttggccccaagacagttaagatttttctcatttccttttgaggttagaccatccaagcactcaaaaggctgggtcagggggataacagcccaggtttcaggccagccttagctatatggtaagggcctattttgtttgtaaactaaataatgttataaattaacctgcttagaattttcccagaaaactccattttaccaagctgtgagacttttttcctaccgtccagaggccaattcaggagtacaacgaatatttgttacttgaaccccccttgagagctaatcaataaatctgtgccttagggctggtgagatggctcagtgggtaagagctcccgactgctcttccgaaggtccagagttcaaatcccagcaaccacatggtggctcacaaccatctgtaacaaaatctgactcccccttctggtgtgtctgaagacagctacagtgtacttacatataataataaatctttaaaaaaaaaaatctgtgccttagctatctacccccttctagacactgcatctctagaatcctcttttgttcataggtccacaataaaagtgttagaaactataaatgggttgttagtattgatgtttcaagtccacaacttaatacctaactgactttgggcacagcacaatgtacagatggtgggaatgcaatggtatcttactctcatttctgttgcttaggtatcactatgtatgccgttggggtaggaaaagccattgaggaagaactacaggagattgcctctgagcccattgacaagcatctcttctacgctgaagacttcagcacaatgggcgaaataagtgaaaagctgaaagaaggcatctgtgaaggtattatagaatgtgtctaaggtagaccttagttagccaaagggcagcatgaaccccagagaaaaacctcaaaccgtttcttcagtgcccagaaaaatgcctccctgctgaccaagtgatacctaaaaaggcactgcacccaaaaaaatgaagagggaagacaagtgtgatagctaccatgtcttgctgtgccaaatagcgtactaaacttttttttaagatatattttatgtatgagtgctctatctgcatgtactcctgtatgacagaatatacagatggttatgaatcaccatgtgcttgctagaaattgaactcaggacttctagaagaccagccagtactcttaaccactgaagcatctctccagcccccattctaaatgttttgatatactagtcttaattctcactaaaccctagagaagtttaagcaaggagccaccactaaagaaaccaaaaaataagtactacttcaggaaatttgtggggatacctgtccttgagggctcaccattgagcatttaaagggtgccttcctgcagggacatctacgtctagaatgactctcctttagatgttagacatttaatatacttttctccaggtcactagctgacctcgttatacttacacataatacccattttgccttttgggttcagacgcccttaaaatccaatttaaatgatgccttattcctctaaagcaaagaactctggagtgaagagaggacccaaggagaaagccttccagattcccaagggttgagcatgctttgccttgtggctttcattcctagtgaaatgtcttaggtaggtagggctgcagattatactgggtcttttagcaacttcaactttttttcagcatcaccttcttgacatggcatgggggcattctttagacttaagttctcttgtggagagaactgctctaacatagtcaaactgctttgtttgaatccttggtgttaccaaataacaccaaaagaccctgggtcctaaagagcatgtgtggaactatcactccctttggccatctctttccattcagctctagaagactctggtggaagacaggactcagcagcatgggacctgccacagcaggcccaccagccaacaggtgagtcttaaaaggcactatggtcacttgggtcttctgcctcagctcccctgtagacagaagttgtaaagtgacagttaagatttaaatgtcagctaggacccttttcctctgacagacaggaaagcttcactctgtcccttaggccatagtgggtagctactatctctgccaagtgtttttgtcaccgtatgtctcaaagcaaagctctacaacaaagctgagggctgcggaacaccgtgcctcagctggtggctgcttaagacagtcacgtgagacagacttgaatccacttctttctcttcacagaacctgagccagtcaccataaagatcaaagacctactttcctgttctaattttgcagtgcaacatagattcctgtttgaagaagacaatctttcacggtctacacaaaaacttttccattcaaccaaatcttcaggtaattccaagtgaacaatcactactagctaaggtgcagcagccttttagtttgctaacagacttagattttaaagtggggaagaggaaattaagtgcagtaactaaaaactaatgcaggagccattgtctcgacccccaagtacactgtctcttccgttgtttgaagccaaccaagcccttcaccagcatttacttccctgtatctggatccatggaaaaagacttctttatgggttcctgtgtactgataagtcccattattatgtctgggaagtgtggtaaagacaaaggcgaactcttttcatctgctttctcaggaaaccctttggaagaaagccaggaccaatgcaaatgtgaaaaccttatactgttccagaacgttgcaaatgaagaagtaagaaaattaacccagcgctatatccttttccagtaggatactgttgttgaaaatattttatctcaatcagtggtttttgccctgcttttgatcattcagttcctgggtaaaaaaaaaacactttcattattataagccttaatcagcactagagctaggcagatatccaccctctatgctaaattatttccccatcaataaccccaaatcataacttccatgttccatctaggctgctcttaattccaatcaggcagccttcgtagacatgtattcataactcaccctatggcagcttccccttctccttcctccttccatcagatcccaagccaggaaaataacctcttttctgcctagcttattggttgtaggcatccttctttgcccatcagggataattttggggaagggggacaaggttacataaggtcacttgggtacgatagataggctctcattcctgggccaaccagggcttgggggccaatatttagcattacaatacaagcaaaagaccaaacctcaatatattagcaaaacttttcaaataactgtgtagattgcattgacaaaggcatcaacactgaaccaggaaagtgtttttttttttnnnnnnnnnnnnnnnnnnnnnnnnnnnnnnnnnnnnnnnnnnnnnnnnnnnnnnnnnnnnnnnnnnnnnnnnnnnnnnnnnnnnnnnnnnnnnnaaggcatcaacactgatttttttttttttttttttttttttttttttttttcttcttcttcttctgtaagaggcagctagataggtgtttgagagttgaggtcaagccaagcttgaccattcaagcaagcacttagctgtcatctgctggctagtgtaggaagaataacagccaatctggcaacatgtaaagtgtaagggggagacacttaaacctctacattaggatggatatacacagctcttccgaaggtcctaagttcaaatcccagcacccacacggtggctcacaaccaccagtaatgggatctgatgccctcttctggtgtgtcagaagtcagctagtgtacttatgaataataataaatgaatctttgggccagagcaagcagggttgaccagaggtcctaaaaaattcaattcccaactacatgaaggctcacaaccatctgtacagctacagtgtactcaaatacataaaatatgtcttttaaaaaaaaaggatggatatacactagaaacaaagtacctcagataggcacagtacactataaaaggaagaagtttcaaactccatcaagcctttaaaccttcagccctaaaaccacacaatggccccacagatgtgcagattttaaggagctgggtgtgttcctttttgtttttggcagcagagatcctttatatcaattctcttaagagattgaagattctaccaagcaaactggatacaatgattcattctattgaacaaactgccagctgctctgaacttaaaattagagtaagcttactaaagccagctgatactcacctcagtgtcaactagtccatagggaaatggcttaattctgaactactcctgtgccaacaggcttacataagaacacacaattctccatgtaagggggtggtatgacactggtcctccatgtggactgtctttctgatggtagatacacagataaagctggactcactgtcatgggggcagatgatgaggattaagtggcttagagggaagacaagcattaactctgtagcctctttctgtccccttcccccactccctagcttttgactcccatgccagtcttctgacacacctcacaccttcccaactatgagtgtggcactggctagttagttataagcaacactggtttggataaagttttttttttgtctttttttatcataaggaaaagtaaattcaaattgaattatctgggtttgatattttgaaaataagccaactgggcgtggtggcgcacgcctttaatcccagcacttgggaggcagaggcggcaggtggatttctgagttggaggccaccctggtctacaaagtgagttccaggatagccagggctacacagagaaaccctgtctcgaagaaaaaaaaaaaaaaagaaagaaaaagaaaagcagcttaacatgaactactttttatagtcttaaaggcatgttagattactataaatgtacaagagttttaatatactggaaatttttgcaacttgttagttaaatcaaattgtacttgattgtaagttaaaacaggtattccagactccttttccttaatttgagatttactagaagaaatgactcaaagaatggaagctttggaaaatcgcctaaaatacagatgaagaccagaattgcttttatgtatatttgtacaccatcttaaaaaggattttgacaaaggtggtagagcctcccaccataagcagacctacaagctgtaaagcaaaatacaaccagtacaggagacactggattgcttgactgctggacagagaaaatggagacactgaggtgtctaaattcaatgagggtggggggaaggaatcctgaattctgagtttaccatgagaataaataagctgcgcagtgtagtgttccacggtgtactgtggacataatttccttctactgcaacactgaaatttcattttcggcagaaaactgactccacaaattgctattttttgtactggaatttaccttgatgtgtatatggacatgtgcataagtcacagagacatatgttctgtaataagttggatttctacacaatattaaaattcaccattccagaaaatagtgttgagtaaaattcctagtttaaatttgattaggggccatgctatttactagttgttaactcaggctgcctcaaactcccaattctcctgtttccaccttcagagtactgggaacacagacacatatggtaccaagcccaagcttagcttaagtataaactatgtatacatgagaaaagccaatataatcagaaaaaagcaggtttagcgtttgcatatattttttaagctcatcagctcagcagtcactgacttgactagtgatgttattaatgtggaaatagaggtccttgcatgctgctagggaaagtacaaactagcaggttctgaaaacagacttttaactatagcactgccatttgagatcaaaccgaatggtcttaacgtatacaagggagacctgcagagaaatgtcactagttaggaatagcctaaacatcagaactgattcaccgtgtggtctgtatcacagaaatactatatacttacataaatatccatggtgaagcccaaaactaaggtgggtttttgagacagggtttctgtgtgtagccctggctgtcctggaactcactctatagaccaggctagcctcgaactcagaaatccacctgcctctgcctcccaagtgctgggattaaaggtgtgcaccaccactgcctggctgggtttttttttttttttctttaaagtaggatttcaagcatccccagctggcctcaaactcactatgtaacatatggcctttttaaggtctcttgcttcacctaagtgttgaggattatagtcatgcaccaccataactaatttacctggtgctaaggattgaaccttggaattcatgtggatcaggaaagcactcgtaactgtgccacattccagccctcaaatcaatgacaatttgggaaacagggagctccttgagttcaaagccagcctgatctatatactgagaccctgacatctagcattctggtaattctatgaattaacatatacattgctatgcatggacatattaatttgcatatcaagtgcaagagataagtcaaagggaacttataccacttcaagaaagcactcagctgccaggcgtggtggctcacgcctttaatcccagccgggtctacagaatgagttccaggacagccagggctactcagagagaccctgtctccagacaaaaaaaaaaaaaaaatgcacttagctttacagaggacagacaagccgctgtattttaaattatgaacctttcatattcaaaatactataattaaatttatactgatacttaaagtgctttgaccagaatgttctcccaaaaggtgggtggaacaacatttaccaggcttcactccattgagtaatttttctagaggtcaacattgtgactcaaaataaatgttgctacaaagcattaatttggatgatacaaagattaaggtataagtcacagggcttcaagttggctactctttgttcaacctccctctagctgcataaaaccatccctaccactttttccttgatgccacatataacacacaagcccgcagccaatccccactattgattagggactagacagagtatctactgctgaactgaactgggttcccacaccaggcagctgtactctcaccagttaattccaggtacaagccatcaaatgcttcatcaggcatactcacatgcagacatggtaagtaaaaagcttaaggtttcttaaaaaaacagaaaaaactcacagggctggggaggtgacatggctcagcagctaagagcactggttgtgctcttccagaggacccgggtttaattcccaaacagccacatggcagctcacaactgtctgtaactccagttccaaggtatcacactaacatacatacaggcaaaacacaggcgcacataaaatctttcgaaaaaattatgcttgttcaggtgttatcagcatttttaaatttcattgttggcactaacctctttaagcctacatgtcacctgtaacaaacgtcacagtgctcttgtcataatattgagcacatacacatttagcaagtctcaaaacattttttatatacatctttttttaagtgaagcatggcttggcggataagtgcactgttatcaatcatctgtgactcggttcctgaggacccaagagcagcaactggccttttaagcactaggtatacacatggtgcacttaaacgcacataggcaaaacaaacacacacacacattactaaatctttgtgctggagggatggctctgcaattaggtgcacttgtttttgctgatgaaccaggatctagggaattcaatgccctctactggcctcaatgggaatcaggcatgcaagtggtacacagacaagcacaacacccatacatgcaaatcttcaacaaacactttaggcatacattcgaatgaatactgtatgcaagtgcccagagtctagaaaacagtgtacagcaaccctcaacaccttaaatgctcagtgttagctgtgacaattttattcttcaccaccagtctctcacaagatggggcctgggaggattatactgagtagatgaagaccactgtttgctttgactctgaaccagatggaatagcaagttaaatggtaagtggacacaatattgaaaactactattaacaagacaaaacgcttagccgggcgtggtggcgcacgcctttaatgccagcacttgggaggcagaggcaggcggatttctgagttcgaggctagcctggtctacgaagtgagttccaggacagccaggactacagagaaaccctgtctcgagaaaaaaacaaaagacaaaacgtaaagttccagactagacagtcataaatctaatggggagctgcttaaacactgggaaatatttactcaaatttatgtgacctaaagttgaaaacgctgaatccttacttttccatagttcagtaagaatcaaatgtgactaatgctatttaaacaacaaaaaatatcaactttaactaggttagactttcttcctatagcaagctcaacctgtgtctgccagtgttgcttgcagttaacatattctatactcacccagtagagctgtggattaaatccagctggctagaatcccctgcacgtttatggttttttgtttgttttgtgggttttttttttttttttttggtttttcgagacagggtttctctgtatagccctggctgtcctggaactcacttggtagaccaggctggtcttgaactcagaaacccaccttactctgcctcccaaggcatgcgccaccacggccggcttcccctgcacatttaaaatgccactttttacaacccctgatgtgggacagtgacctttcctccttagaaacagcagaatggtacttcttacagattctccatgaaacacagcagagtaagttgtgtctcctaccacatagcttttaaacgttcctttgcattttaaacccttcttgcaaacacaatgactacacaaaaatttaaaaaattatctcatattatcactacctacaaagctctaggaaaaaaaaattaaatgcttatagccaagtcacaacacaggaactctccatattttaaggaactaagtaggaaatagttaatttgaaaatagttctaaattattcaaaatagcatgcaaaatccacagctttggtccatcacaaatcatcccatgcctctcaaacatacccaaaaatacaatgcaaacaccctgagactagaaccccgagcctgtctttacaaggcgctagggataacagcttagaagctttctgtgcaagtttgaggactgaaactggaccaccagcacccatataaaataaacagtgggtgccagcctgcaattctatcacttagggtgtccagagaggctccccagaggaagttagctagactagctggcactgccaaactctaggttaagtgagagatcttacctcagtatataaaatagtgattaaaaacaccaaatgaccttctgattagatattattgtatcaccacaaatgtgcatttcaatattgaaaatatacactcaaacacttctctggtccacacattttgcatagtgatacagtgtacaatcttttaacaaaaccccagcaaaatgaaaaccaagcagtataacttctcacccaagtcttgcctgtggtttcaagaaagctaaatgttagaaagcaaacagacaccatgtttttcaaaaggagctctggcaaagttttattaaaggaaaactttcttgtttacttctcaccagtctgttctggcatgcttctaataatatcagaatcacctagaaaataaaataatagttttacaagtcatttaatggcaactaataattaaagaattcccctacttgttctttaggtaagaaggcagattagcactacgtgcaaattgtttcggctatcactcttaaaatcacttaaaaataccttaaaatctcagccatcctatacaaataatgaatcagatggtctgtcaccagcatttagataaccagactgaagtaaagaactaggtctggggacacatgcatggtcttactatagcgaatgtctagcctgtcctgattatcacagaatcagaacagcgagaatattcgcagtgttctacaaggcaactaaaatttctaagctcaaaataaaatagaatgcaggcatttaccacaaactatttatccccaagcaacaaagaggtggtaaaattttatctcgttcaccttctaccaaacttttcttcccaagggggggtatggtaagaggggttgagaggggtagagggacaaagagtttcactgtgctgccccagttgtcctagaacttgcattaaacaaaattcttaatatcaaagttgaaccaaagccactgtctaataagcacttacattagaaaaaaatataattttaaaaacatacctgggtcaatgatagccagtgtgcatactctgtagtattttccacacgctgtgcccagttcaatattattgccactgtagtgatggaccccagttttagccaacatggcatagtactctatttcagatttccttagggaacaacaaaaagtcaaataaaatgccataccaaggtactgacagacttgtgacaaattggtgaggcctttttaacagtaactaaatcacttccaactcttaaaaaagattctagctgtcctgattatcatggatcctttactagtgtattgtgataattaaatacctaactttttggaggtagtatccaatattaaagtacattgtattcatgtttcaatttactaagtttaaaatgtgtaagttacttaaaaactagaaaagggtataatagacataaaaaagccaatgctggcctggagatatggttcactgaaagcttgtactgctcttaagaaagttcagtttccagcattcacatcagccacctcacaacaccaggagaatctcgtgtcagcaacaagtatatactccattttaatcaaacgaaggcaaagaataataggaaggtggagtggagggtcagaaacctaaaaaagtaagccctcttaaaccacctactatacagtgaatactacataagggctgctgataatattacccaaaaaataaatacttcagtgccaagttaaaggatacaaattgttaagatttgaaagttccacagaaccttgagcttagaatgtggccccacataccaacagtgctccaaagtgcttatgagaaatgaacttgaagctccagcctggacccactgagtctgagcttgtaatttagtaatgaatgtctacgctgccactatgaatcgactggcaaaggtttaaaataagaccaaacattccaaactctgccactaagtatagacacctacataaaaggctgaagaggtgtacaattgccatagaaaaatcaaggagcgtatactacacaagcttcttcagcttacttaaaatacttgttaggttcgagttaaaatagttaatcaagaatgaacgtgttcagaaaattggaccctgccaaataggtgatttcatgataccatcacctccataatccagccagaatttttctaaactaaaacaggcacatgaagcggagtgttaacacttcaaaccttgaaaaattcgggatcgggcttcccccagtctgcgtgtatcatttgtatacctcctgtcacacaacgtgcctcaaaggtacatttacaaaaaacacacacaaagcaaggtccaaacatcagaaagcaaccatcattattcttcttcccaatgctggatactgcacagtgaatttacaataggctgcacacatccaggttccctccattacctcaaagctggacagttgttggcaaggataaccaacttcgctttgccttgtctgatcatcttcagagtctgcttgtagcccagcacgtacttcccacttttcataacaagttggagcctagagttgatcgactccagagactttttctacaatgcaaacgtttgagacttgaacaccacttgcagtcatctaaaaccaaactcagttccagatttctggaactgaaccctttcatgatgtctgagaccatacaaagagcctctcggattcactttgagaccctgaaacgtcagcgacaagtcgtccacccagtgtgctcaaatctatccgccccggcccgacccagctctccacgtgaaccggcttccgggcccgatcggcttcactcaccgtcttctttgcggccaccatcttcctgccttaggtgcgggacaacccccaacctagcatacacagaggacagaagagaggattataatccagagcgtcaaacaccagctagcggagctccccgagccgcctaatcgtttaccccgcagagctcactcaccaacaccagccgccaagatggccggggagcgagaaaggaaggagctcccacaatgcaaagctcttctaggccgacagaggattgtgggaccggaagcggaagagaagccggtccgggtcacaagcagaacagcgcttgcgagagtagtctgcggtagttggttgctatggggaccgggttacaacgcaggctgggctgctgcggcgtctgggctccggccttcggttctgggcgtttgttctgctgcagcgggctgacaccgcggagagccggagctcgatgggagctgacgacgaggcccagggctccgtggcgaggcggcagcgacctggcctctcctgggctggtctccgcctgacgttgtcttgggcgtgctccggaaggaccccgggccgccggtttaccccgtgactgctcaccaggagcggaggcatctctgtccacccgccgctgatcttcctgtttgccgctccgtaggacacacaccccttttgcggcggttttataccgtgtacttgggagcctactttgcacagggaccacaattgaaaaaaaaaaaaaaaaacctggtgaagtggctgacgggtaaatgcgcttgtcgctaagtagacgaatgagttccaaacccacgtggtgggaggggagcgccaagtccagcaggtttttctttggcctgcgcttgaatgctcacatacgtatacagaagtaaagaaatagtcgcaatacgaataatttaaaaaatcattttgctacgaaacttgggccgttgtataaatgtagcattcaaggaaaaaaaaaaaaaaccttgaaagcctctactatttacgcactagcaccaacgaaaacccagggctgttgagattgttcagtcagtaaagtgtgcttgccttgcaagcgtggggacctgcattttatgcctaaacctctctgtcaatccccagcccccaaaagtctggcatggttgtgcacacttgtaactccatttgtggaacagattccccaaggctggctagccagccaacctagtctaacctgtcagctccaggtctcaaagatcttgtgaaaaataaggtggacaactaccgagtaagtacccagaagttgacctgtgacctctgcccaactgcacaagcacctgtgccaccaaatttatataagcatgaaaaaggaaacccagggtagtaggtaagctgtatggtgagttactttgccctggaggttaggaaagggaagaacaaccctgcctccccttaattaaaataactttaaaaacatccatgagtcatgcgggtcgagatgatctatacctataatcccacccggagctggcaatctctgtgagttgatcttttggaaaaagaaaaaaaacggaaactaaaacatattacttagccaacacacacactctatgagatagtaactgtgttattctcacatttttacagctagtgtattacagaagtatgaatagaaccaggcctgcaaattagggttttttggtttttgtttgttttggttgagtcttttgagacaggatttctctgtctgtcctggaactcactctgtagaccaggctggcctcgaactcagaaaatccagaaattttacattaaaatttattcaactgttgtggcccattttaatgtgaatttgaccaaacggtagtgttcaattaccatactctttgctttaacatttaggcataaagtacttaggatggtacaaatccagctaattgtcttctattaatccagttttgtaaacatagtaaactttaaatgaactttaacaaatagctcatatgatttaaattcaaagcaataagcctagattggagttgtgacattgctgtttaacatgctacccttaccccacccacccccctttttttaatcctgtgctttgctgacctgtttgggattttttttttttttttttttttttttggtttggtttttcgagacagggtttctctgtatagccttggctgtcctggaactcactttgtagaccaggctggccttgaactcagaaatctgcctgcctctgccttctgagtactgggattaaaggcatgcgccaccacgcctggagattttttttttttttaaagattttgttttatttatatgagtacactgtagctgtcttcagacacaccagaagaggccatcagatcccattacagatggttgtgagccaccatttggttgctgggcattgaactcaggacctctggaagagaagtcagtgctcttaatcgctgaaccatctctccagccctctgctgacctgttttgtttgtgattgtcctctgattatgaaatggaatgtctgcttaagagcactgtgcaatacagttctcttcaggtgcagcttgggagtgttgagggcctcctgttcatactagacattcaagtatgaatcttctgcctgccttcccccactctcaaatatttctggtagacacttaaaatgaaccatactgtaccctcagaattaatgtcatactaagtaagatacagtgtaagtcttagtgctgtgtgaagaaattgttatggacattataagtattaattcgaaagggtgccatgtagcaggctctgggttttgctgctcctgtaaggtgctttcagaagtgctggtgatgtatctcacttggtagacgtttggctgtcgtgcacaaagtcctggatttaaccccagtaccaccaaaagctgggaataataatgcatggtgtgtaactccaacacttggaggtgggggtgagaggggagaagctagaatagaagctctagttctaggtcatcttccattacatatcaagttcaaggccctcctgagaccttgtcttcaaaaaacgaaaggattggtaaataaagactataatgtctgtttacagctgtgcagactttaatatacttttgctaaactttaacttatggtcatgttgtcatagaccatattaatcttttttttttttttttcggttttttgagacagggtttctctgtatagccctggctgtcctggaactcactttgtagaccaggctggcctcgaactcagaaatcctcctgcct

SEQ ID NO: 1253 - DNA, 3573 bp, Mus musculus
ctttcagggagcctcccaggcagccagcaagcgcggagagcgcactgggatgggacttgaaggcggcttctcaggacacggcgctggcgcgggattcttgttcgcgtccggggatcggtgcccaaggagctctgcggtcctctgcggggcgaggcggcggaccacggagactgacactcacagctgctcccctgtctctcttcccgggtgtcggcggcggtggctgcagctgcagccctgctcctcttgaagatggagaagatgttggtggggtgcttgctgatgcttgggcagctcttccttgtcctcccagttgacggcagagagcgtccccaagccaggttcccttccagaggccgtcatgtccggatgtatccgcagactgcactgctggagagttcctgtgagaataagcgggcagatctggtgttcatcattgacagctcccgaagtgtcaacacctatgactatgcaaaggtcaaggagttcattctggatatcctgcagttcttggacatcggtcctgatgttacccgagtaggtctgctccaatatggcagcacggtcaagaacgagttctccctgaagacctttaagaggaagtctgaggtggagagggctgtcaagagaatgaggcatctatccactggcaccatgacagggcttgccatccaatatgccctcaacattgccttctcagaagcagagggggccaggcccttgcgggaaaatgtgccacgcatcataatgattgtgactgatgggaggcctcaggactcggtggctgaggtagctgccaaggcccggaacacaggcatcctgatctttgccatcggtgtcggtcaggtggacctgaatacactaaaggccattgggagtgagccccacaaggaccatgtcttcctggtggccaatttcagccagattgagtccttgacctcagtgttccagaacaaactgtgcacagtccacatgtgcagcgtcttggaacacaactgtgcccacttctgcctcaacacacctggctcgtacatctgcaagtgcaagcaagggtacattctcagcacggatcagaagacttgcagaatccaggatttgtgtgccacagaggaccatggttgtgagcagctgtgcgtgaacatgctgggttcctttgtctgccagtgctacagtggctacaccttggccgaggacgggaagcgatgtacagctgtggactactgtgcctcagaaaatcatggatgtgaacacgagtgtgtaaatgctgaaagttcctacctgtgccggtgccacgagggatttgctcttaacagcgataagaaaacatgctcaaagattgactattgtgcctcttcaaatcacggatgtcagcatgagtgtgtcaatgcccagacgtctgctctctgccgctgcctgaaaggcttcatgctaaatccagacaggaaaacttgccgaaggatcaactactgtgcactgaacaaaccaggctgtgagcatgagtgtgtgaacacagaggagggtcactactgccgctgccgtcagggctacaatctggaccccaatggcaagacctgcagccgggtggaccactgtgcacagcaggaccatggctgtgagcagctgtgcctgaacacagaggagtcctttgtctgccagtgctcagaaggcttccttattaatgatgacctcaagacctgctccagggcagattactgcttgctgagcaaccatggttgtgaatactcctgcgtcaacacagacaaatcctttgcctgccaatgtcctgagggtcatgtgctccgaagcgatgggaagacctgtgcaaaactggactcttgtgctttgggggaccatggttgtgaacattcatgtgtaagcagtgaagactctttcgtgtgtcagtgctttgaggggtacattcttcgtgacgatgggaagacctgcagaaggaaagatgtctgccaggatgttaaccatggatgtgagcacctttgtgtgaacagtggcgaatcatacgtctgcaagtgtctggaggggttcaggctggctgaggatgggaagcgctgcaggaggaagaatgtctgcaagtcaacccagcatggctgtgagcacatgtgtgtgaacaatgggaactcctatctgtgcaggtgctcagagggctttgtcctagctgaggatggaaagcactgcaagagatgcactgaaggcccaattgacctggtctttgtgattgatggatccaagagccttggagaagagaactttgagactgtgaagcactttgtcactggaatcatagattccttggcagtttcccccaaagctgctcgtgtggggctgctgcagtattccacacaggtccgaacagagtttaccctgaggggcttcagctcagccaaggaaatgaagaaagccgtgacccacatgaaatacatgggcaaaggctctatgactgggctggccctgaaacacatgtttgagagaagttttacccaagtagaaggggccaggcccccctccacgcaggtacccagagtagccatcgtgttcaccgacggacgggctcaggatgatgtctctgagtgggccagtaaagccaaggccaatggtatcactatgtatgccgttggggtaggaaaagccattgaggaagaactacaggagattgcctctgagcccattgacaagcatctcttctacgctgaagacttcagcacaatgggcgaaataagtgaaaagctgaaagaaggcatctgtgaagctctagaagactctggtggaagacaggactcagcagcatgggacctgccacagcaggcccaccagccaacagaacctgagccagtcaccataaagatcaaagacctactttcctgttctaattttgcagtgcaacatagattcctgtttgaagaagacaatctttcacggtctacacaaaaacttttccattcaaccaaatcttcaggaaaccctttggaagaaagccaggaccaatgcaaatgtgaaaaccttatactgttccagaacgttgcaaatgaagaagtaagaaaattaacccagcgctataagaaatgactcaaagaatggaagctttggaaaatcgcctaaaatacagatgaagaccagaattgcttttatgtatatttgtacaccatcttaaaaaggattttgacaaaggtggtagagcctcccaccataagcagacctacaagctgtaaagcaaaatacaaccagtacaggagacactggattgcttgactgctggacagagaaaatggagacactgaggtgtctaaattcaatgagggtggggggaaggaatcctgaattctgagtttaccatgagaataaataagctgcgcagtgtagtgttccacggtgtactgtggacataatttccttctactgcaacactgaaatttcattttcggcagaaaactgactccacaaattgctattttttgtactggaatttaccttgatgtgtatatggacatgtgcataagtcacagagacatatgttctgtaataagttggatttctacacaatattaaaattcaccattccag

SEQ ID NO: 1254 - protein, 965 aa, Mus musculus
HSQLLPCLSSRVSAAVAAAAALLLLKMEKMLVGCLLMLGQLFLVLPVDGRERPQARFPSRGRHVRMYPQTALLESSCENKRADLVFIIDSSRSVNTYDYAKVKEFILDILQFLDIGPDVTRVGLLQYGSTVKNEFSLKTFKRKSEVERAVKRMRHLSTGTMTGLAIQYALNIAFSEAEGARPLRENVPRIIMIVTDGRPQDSVAEVAAKARNTGILIFAIGVGQVDLNTLKAIGSEPHKDHVFLVANFSQIESLTSVFQNKLCTVHMCSVLEHNCAHFCLNTPGSYICKCKQGYILSTDQKTCRIQDLCATEDHGCEQLCVNMLGSFVCQCGYTLAEDGKRCTAVDYCASENHGCEHECVNAESSYLCRCHEGFALNSDKKTCSKIDYCASSNHGCQHECVNAQTSALCRCLKGFMLNPDRKTCRRINYCALNKPGCEHECVNTEEGHYCRCRQGYNLDPNGKTCSRVDHCAQQDHGCEQLCLNTEESFVCQCSEGFLINDDLKTCSRADYCLLSNHGCEYSCVNTDKSFACQCPEGHVLRSDGKTCAKLDSCALGDHGCEHSCVSSEDSFVCQCFEGYILRDDGKTCRRKDVCQDVNHGCEHLCVNSGESYVCKCLEGFRLAEDGKRCRRKNVCKSTQHGCEHMCVNNGNSYLCRCSEGFVLAEDGKHCKRCTEGPIDLVFVIDGSKSLGEENFETVKHFVTGIIDSLAVSPKAARVGLLQYSTQVRTEFTLRGFSSAKEMKKAVTHMKYMGKGSMTGLALKHMFERSFTQVEGARPPSTQVPRVAIVFTDGRAQDDVSEWASKAKANGITMYAVGVGKAIEEELQEIASEPIDKHLFYAEDFSTMGEISEKLKEGICEALEDSGGRQDSAAWDLPQQAHQPTEPEPVTIKIKDLLSCSNFAVQHRFLFEEDNLSRSTQKLFHSTKSSGNPLEESQDQCKCENLILFQNVANEEVRKLTQRYKK

SEQ ID NO: 1255 - DNA, 187851 bp, Homo sapiens
tttagtagagatggggtttcaccatgctggccaggctggtctcgaactgctgacgtcagatgatccgtccgccttggcctcccaaagtgctgggattacaggcatgagccaccacgcccggccctgtcttgactctttccttgggcttttcgttggccatggccagcatctcctcagctgctgtttcacaaaagaggtatcaggtctgcaccaaaccaggagcagcagaagtagatacagcttgttttgtttgtttgtttttttgagctggagtctgctgtgtctccaggctggcgtgcagtgacatgatctcagctcactgcaacctctgcctcccaggttcaagcaattctcctgtctcagccccctgagtagctgagagtacaggcatgcgccaccacgcccagctaatttttgtatttttagtagagacgaagcttcactatgttggccaggatggtcttgatctcttgacctcatgatccacctgccttggcctcccaaagtgctgggattacagtgagcctggccttttttttttttttttaatcattataatagtgtaaacacaatttttattaagatggaaacctcttaacccaggaaataaaaattatatatcccttgatgtatgtcaacatgtagcaggtatatttcttcaatagagcaaagatagttttgtgaggaactgtgattaagggtaggatgcacatagttcaccagcaatgagggttggagccgcgtttctctaaggaaaggctaggattgagtgtggcatcatcttggctgctacttactagtcacaggtctgggctgcggtgtctcagcccctgctatccaagtgacacgttccaatttctgggctcctagatggggatgtccaagctaggcctactcaggggcagatgagtcttcacctgtgcctaaggaaagccctggctctgggaagacaaggagcaatgggtctgctgtctgtgaccagcaacagcataaaggaccgtgttgtctcatgtggcagggacgccccttgcacccagtgtggtggcctttgtgtgatatccattttattcattttaactaaaggaatgtatttcttttcttttctcttttttttttttttttaattcagagacaggatctcactaaattgcccaggctggtcttgaactccttggctcaagtgatcctctgcctcggcctgttgggattataggcatgagccaccatacctggccaaggaatgtatttcaaattactctttttctctattttacttcacagggtgttccttgacttgtttttaactgtaggtctttattaaatttacctttcctatatttagttgccttcagtaaataataatagcagctctaaatcccagtcttctctatcttgacgacctgttgacatttcatattcatggtgtccaaaatggaaaattgtcctcccttttccccagatctcctcctgttgatttaatgtgtctccgttgtgttcccgtcttcctgacttaagatcacaggtcctcttcacttcgcccctctttctttccctgtggcttctacccttttatgaggtagcataacatttaccatttactgagcccttcctgtatgcagacatgcttagatatattattaactctatccccattttacaggtgaggaaaccgagggtttcagaggtaattaactgggccaaagtcacctagtaagtggcagaggacttgaatgcagattgaatacatcaaagtaggtaatgcatttctttgagacatctagaatttcagaattctgtacatataacttcttgcttcttaacaatcatcaatttctactaatttgaattaatacatcccaagaaggaaagcaggttgtgcaaagctgtgtaaactgtaaacttggggtggatcttcaacttgaagttcgtgttaacataagtaaagctgtcagtttcccatttaattagactggaaaatgctctgcaaatatcagcttttcattgttataaagaatgtattcaggcaggaagagggatcaacagaggtgggccttttagagtggttgtttttaagggagcaatttccttttgaggaattgtccctgcccctgccccagaaagccagtatcgctgtctattttcacacctatccaatagagacagaaaagagtagtcaattcccatgggagtgtaagcttttttttttttcccctgttgaagttaatgcattgtatcatctgtgtccctgagagttaaacttccttaaacatcttaatacaaaatccaggtatgagctgggcatcaagacacattgcaaactcataggtttcaataaaattacataagtaatggattgcaagaaggaacagaaaataaagccaataacatccttttggtctccatctgaaaatgacttccttctagaagcctatggcctaccaatctgagtggcattttttttttttttttttctttttgagatggagtctctcgctctgtcgcccaggttggagtgcagtggcgcgatctcagctcactgcaacctccgcctccccggttcaagtgatcctcccacctcagcctcctgagtagctgggaccacaggtgtgcaccaccatgcccagctaatttttgaatttttagtagagatggggttttgccatgttggccaggctggtcttgaactcctggcctcaagtgatccaacccccttggcctcccaaagtgctgggattacaggcgtgagccgctgcgcctggccctgggtggcattcattttatgttcttccatggcatcctcagcatccccaatcaaggtatatcttccgctctatggttactgcttttcttgtcgatagtcccccagtagattataaactcacagagagtctatgtgttacttattgctctgttcgtgtatggcacatgtctggcagatagaaggaactcaaaacatatttactagaataaaataaaataagcacataaggagaattaaagccagctgtaatcccatcccagtgactgcaacaaatttttaaaagcaactcagtggagctcaagttccatagagacaattcagaagagcctactagaaaaaaattccattccaccgggcgtggtggctcacgcctatgatcccagcactttgggaggccgaggtgggcagatcatttgaggccaggagttcgagaccagcctggccaacatggcaaaaccctgtctctactaaaaatacaaaaattagccagtcgtggtggcacatgcttgtggtcccagctacttgggtggctgaggtgggagaatcacctgagcctgaaaggttgacgctgcagtgagtcatcataataccactgccctctagcctggacagcagagtgagaccctgtctcagaaaaaaaaaaaaaaaaagaaaagaaaaaagaaaagcaaaaaaaaaaaaaaaagaaaaagaaaagaattcattcattcctatagatgatgcaaggagaccgcgggaaggtcactgctccagcaaccctgccaaagccacagctggagtagtgtgtactgggctggggggcttttaggggagtgtcgacttttagaagaaagttgtaaaggtgataacagcaacacagtaataaaaggattgctttccgaagaaagattaaagtcccgctaagatgagaggctacctaatagtctgcctaaatttgaaatcaaaaggaaaccagcattcttagttcttactattcttgtgatcaagtcccattcacgtgagcttaattcagtaggaatctgaatacaaaattaaattgctagatgtgtctcctcttaggagctttctcttttccctttcctagtaaatcgttgttaaagcaataaatgaccaaatctaagaccttggtggaaccctgagaccttggataaatgggggggaattctcaacagctactatgcaacttaaagatagtgacctgttcacctacttcctggtcacttcagatttaaatgaaatccctgtaagaccatacatgataaaccttgtttgtctttaatcctttataagaagatcacaaaattccaatagtaaaagcaatgtaaattcccctgtggcaggtaccatagactcaagcacagaaattcccactgcaggcaatttctgcagtggaaatgaattttttttgtcttcagatactgtctcacactgtcacccaggggagagtggcacgatcacggctcacggcagcctcaaactccttggctcaagtgatcctcccacctcagcctctctgagtaactgggattacagacatgcgccaccatgcctggttaattttttttttaatgttttatagagacaggagtcttgttatactgcccaggctggtctctaactcctggcctcaagcaatccttccacctcaaccttccaaagcactgagattacaggtatgagtcactgcacccggccttcagactttgttctttttctttcaagattattttggctattagcatcaacctgtcagtttctgcaaagaagcctctgtgatttcagtaggaattatgttgaatctgtagatcaatttggggatactgccattttattaagtcttccaatccatgaatatggaatgtctttccatttgtttagatcttctgtaatttctttcaataatgtttgcagcttttagagtatagagtttgcatttcatttgctgaatttcttttcttttttttctttattttgagatggagtctcactcggtcacccaggttggagtgcaatgacacgatcttgactcattgcaacctctgccttccaggctcaagtgattctcctgcctcagcctcctgagtagctgggactgctggcttgtgccgccacgccaggctaattttgtattgttaatagagacagggttttaccatgttggccaggctggtctcgaactcctgacctcaagtgattcacccacctcggcctcctaaagtactgggattacaggcgtgagccaccacactcggcctatttttgttattcttgaatccccatttattgagctctgccagcgggctgggggattttatagaatagatgcacatagacattgcccaagtgtctggcaaactgatttaacaccaggcatcccatgcagacatagactcattaatatccttgagagaaggtagttagttgagtgtcacaaggatgaggctatcggctcctaatagccgaccactttgtgccaatttctaggtttaggaatgaaagcagcagcaatctgtgttgctgagcgatgcttccataaatagcaggtccatcctccatttccaaagtgaaacctagtctgcaggtagacaggcagtgtttcagccttgtcagtatccaagaaaacaaatcatatttgtgctcactattgcctatgcattaaggctccccactttattatctcattctttacattaatttttttttttttttttgtagagatggggtcttgctgtgttgcccaagccaggctcacactcctgggctcaagggatcctcctgtctcagcttctcaagtagctgggactacagccaactgcaactgcctattatctctcttttaaaatctgagacggggtcttgctctgttgcttaggctggagtctggagtgcagtggtgcaatcacagctcatggcagcctcgacctccccagctcaagtgatcctcccatctcagcctcccaaattgctgggaggctaatttttaaatttttaaaaaattaatccagctaattattaaattttttgcagagatggggtctcactgtgttgctcaggctggtctcaaactcctgcgctcaagtgatcctcctgcctaggtctcccaaagggctgacatgacaggcatgagccactgtgccaggccttatctcatccttgataggaagctgcatcaatctgattccacaaaactacaaggctctaaaatcctggttagagccggtgtaacccagtcccttctacagcatggcatagggcaagatctataaataagcaaaaggcccagtccctgtcctcaggagctcatggtccaagtcaaaatcacataaaaacatttgagtcccctttgaaatgagtattgttttcttgaacaaattttcaacttgctgtagtttttttcctgatcactttcatcctgtctttccaagatgggatatgtttatttagaaattacttcacctgggacagctgcttctctcttttgctcaggcccgtagcactgcaggatgggcaagtgtcgtggacctcatactgctaggagtctctgtagtcaccaacaagatcagaagtggcatgataaacagtacaagaaagcccatttgggcacagccctgaaggccaacccttttggaggtgcttctcatgcaaaaggaattgtgctgggaaaagtaggagttgaagccaaaaagccaaattctgccattaggaagtgtgtcagggtccagtggatcaaggatggcaagaaaatcacagcctttgtattcagtgatggttgcttgaaccttattgtggaaaaccataaagctctggttgctggatttggtcaaaaaggtcatgctgttggtgatatttctggagttcgctttcaggttgtcaaagtagcctgtgtctttcttttggccctatacaaaggcaagaaggaaagaccaagatcataaattttaatggtgaaaacactgtagtaataaatgttcatatgccaaaaagaaaaaaaagaaattatgtcacctgggacaatggtgccatcagtcagcctgtcctcaaaggaaccctctggacatggacccaactgtccatgtagatggggtatcccaaagggagctctgccctgcctacagggttcccctccctgggctggagtccaagctcatccactaccttggaacattcccttaaccctgcatctccagctccaacaaatgggcagctggccggatatgaagatgtttcctctcctggccttctacttgagggagacagggaggagctctaatagtttacataggactcaaacactgtctgtcacctagggaaacagtgcacgtgagatgacattgcaattttacatgtctcctcatgcattcagtagagctttattttaggtttataggtccgtgaggcaacctgtttcttcttcagtttccttatactgtactctggtcccctttggatttgacagtctcatttcaatctgccctctaggccagatagctaggtctcaagtaagaaggattctaatgcaaaacaaaaagttctaatgtttacaaggagcaaagggatgcttatgtttaaagtctatattcgaggctgttcacgagtgtgaggcctgggtcaaatgactctcctgacccaaatccttactccacaatagactacgtggagatcgagaactgagagttgatcccaagtatagctactcaggttgtgattagtttaaacagataccaattccagttaacttgtgagctcttaggagttctcagataatacatacctcatttttgtctgcttacatgagtgcccacataagaactgaaaatctgttttttttctttctgggacagagtctcactctgtcacccagtctggagtgcagtggtgcaacctcggctcattgcgacttctgcctcccatgtttaagtgattctccagcctcaggctcccgagtagctgagattacaggcgtatgccactacacccagataatttttgtattattattattattattcttaattttaatttttattttttgagatggactctagttttgttgcccaggctggagtgcagtggcacaatctcagctcactgcaacctccgcctcccaggttcaagcgattctcctgagttgctgggattatagcctcctgagtagctgggattataggcgcccactaccacacccggctaccttttgtatttttagtagagacggggtttcaccatgttgaccaggctggtctagaactcctgacctcaagtgatcagttcgcctcagcctcccaaagtgctgggattacaggtgtgagccatcgcccagtcccagaactaaaaatcttaaacccacacttctgaataaggttctctgtacatctagcacatggcaggacctctagcagaaaaggcaattttggccttttcctaatctatagtcttaattatcaacttgcaattcatcctgaaggtaacccagaaatcatttcattgtttgttctgcctttatatttcaggacattgaacttgcttttccttcatttttttctggcagacctgaagatcatcccacaaggtagaacaactcatttaacctatttgacttggccccaagtgtaatttgtacatagattaactattctgaagaattccaatagaactccctggggggaaaacacccattttaattggcatacaccagagtcactggaatcagttactaaattacaatttccttacaatttggaagggtttggggattgttattgttttcctggtaaattactggatcacactggtgtcttggaataagtcaacacattttaaatttaagtttccataaactgtagctcaacttcccaagttcctaggggattttcactggcccagactcaggaagaattttcttctatgggatccaagacttcagagaccaaacatttcctgaagactttcctctgctttctgacctccacctacctcctcccaaagacataacaaaaaaactatttgtgatcagtgcaggcagccaagagtgcccagtgggcctaaggtactgggtaaaggaacaggaatccacaattctttcttggtattaaggtatcattgacttgcctgatggctcgagtatgttaaccccttgcttcatggctggaattttaattacccctcctggagcttttctgaagaattgattttggcgtttattcatatttcagaaatcaactctatcatcaaataggaatgatggttaattacaaaacaaagtccgcccaaagcaccaaattatcagactgtggcacatccagaggttttgaaactagttagtgctgctgcctctgctggtagcttgttaaaacctgaactggggccgggcgcagtggctcacgcctgtaatcccagcactttgggaggccgaggcgggcggatcacgaggtcaggagatcgacaccatcctggctaacacggtgaaaccccgtctctactgaaaatacaaaaaaaattagccggccgtggtggcgggagcctgtagtcccagctactctgaggcaggagaatggcgtgaatccgggaggcagagcttgcagtaagccaagattgcgccactgcactccagcctgggcgactccgtctcaaaaaacaaacaaacaaacaaaaacacaaaacctgaactgggtgcgttggctagtggtttgggaacagaattttggagctttataggagatgtcctggtctgttatacatccactcaccccagcctccaggaactggggagctggtagaggggggtgccggccactttgactgtcgctggccaatcctgtcttctgcatccctccaaggctccatggggacatccaaggtgaggttcctccattctgcaaagttgcaaatgtctctgctcataatttcaaaagtcttgtctgaactagactttccctgctccctcggggtaggaattttgtctcctctccatcctggcatctttacctcctccccatcccggggcctggtccccagccagtggacgctctgttaatatgaactggcactggtggggtgctctgggcactggcaagacagctcttggcgcttgtcatcaattagcccaattctcaccacttttttctccatccccgcgtcagtgggtgcgtcccgcaggtcatgaccccaagttctagatgtaagattcctgccatgtctcctttcccccagaagacccctccccgcactcccaacccgacaggcccctaaagctgcctgtgttccgtgcctgcggctccggacccctggagtctgatgcccgcctgggctcaggcacggacggagtggagccaggtggcagcaggcagggcgcgccgccagagtgcccagctcccggggctgcccacagggtggggccgccctcgccgccgctccctctccgcgccttccccatccccaaagaggacacccctccttccgcccggcccgctccccacccccgccgcggcaccgcctccccagccgcccgcccttgcccagcgcctcccaggcagccagcgagcgaagggagcgctctgggatgggacttggagcaagcggcggcggcggagacagaggcagaggcagaagctggggctccgtcctcgcctcccacgagcgatccccgaggagagccgcggccctcggcgaggcgaagaggccgacgaggaagacccgggtggctgcgcccctgcctcgcttcccaggcgccggcggctgcaggtgagcgcggcgcgctttcccccggctctgcgcggccgggcggcctcgaagtgcaggcggaccgacccaccgacagaataccgagcctgggctgcccgacgcgcaggcgccctccccaggcccgcactgcagcccccagcgccccggggccccggcgccttcgacccctccgaggacagggggagagggagggcggcgctgcccgacccctcggccgggagagctgggcgcgctccctgcgcaggacaagccgcgctgcagccgccccggagtgccccgtgggggcgctgtggcacgcagcggggacgcccagaccccggccaccgcgacccagggaaagggagacctgttgagcgggtatgcagggtgattcctattccacggacagccgatggctcccccttccctcttcggaacctggtattttcatgcccgtgtcatctggattttgttcttgggtctctatggcagctaaacctccagcttccctatattgtggaagagggagagaaaggggaaggcattttgtggtagttgctagaaaccccagaacaatttggagccgtttggggagaggacagagaaatggggactgtccctggtagggtctccaggactgggggcacaggaaagtgctctcctcagggacactcgcgcccaccctgaacaaacccaattgaccaagtttcaatttgtcataaatcaggaagccacaatgcatctgcaccaagcacacttaaaatcggcctttaaggaatggggcagtcaagagacttcagggacccgtggtcgagagcagagactggggtcagcctgcttgggtttcaaccccagctgtgaagtttacagggttgataacttgaaggtacccaagtatgcctcagtttcctcatctgtctaatgaggatggtaatacccacagaactgtgaggattaaatgagatatggcggccgggcacggtggctcagggctgtcatcccagcactttgggaagccggggcgggcggatcacctgaggtcgggagttcgagaccagcctgaccaacatggagaaaccccgtctctactaaaaatacaaaattagccggacttggtggcgcatgcctgtaatcccagctactcgggaggttgaggcaggagaatcggttgaacccaggaggcagagattgcagtgagcagagatggtgccattgcactccagcctgggcaacaagagctaaactccgtctcaaaagaaaaaaaaaaagatatggcaagtaaagtccttagaacatttccaggagcattctaagattaggtgagttccatggcttgtctttgcagaaatagcaaggagctgctatgagcagtgaatgtacctcttccccagttcagaaagagaggctctccatgggtacgtgagggtggcagataagccacgtgtatgcaactggtagttccatgcaggagtccacacgggcgcagttctccctgcttgctcccaaagggccaacctcataaaaccatgtcaaaataccaacatgggtttatgacctggaatgtttcctctcagtccctgaaacttggcacttagaatcctctgtggagaatgagatacttatggctcttcaccttgcattttcctatctgtccacactttttacttttatttctgccaatagaattcaatctcaggcccccgagttaccaggacactgtcttctataaatcggggctctggggtttcttgttcccaggcaacccagggccaccaaggcctaagcttgcttgttggaggtgtcagagcagagtccaaatctgaaacaccctcgagcagctgtcatgccctaagctcttatcagcgagtgccatatgtccttgtttagcaaaaggtagttaaaagtgtggcctgagatttaaagaaaaggagagatgtttgctctttgaaataagagagccattggaggttctggaaaaataattctacagtttatttagaaacagttctgactggcacctaagagagggcaaggagtgaggtggggagactaaaagggggagagaccggcttaggcctcaggaaaagcaggccgaagagggtgtgacaggtctaacgctggcctgagcaaggtgttgggtatgaggctgggcaagcagtaggagaggtgagtggtttaagaccagtcaagttggcagagagcctctagtgctgcccctggcactcactgccctctgatctgtagcacctgcaggagcgtcccttccagggattccccgtcttctagggaagctatggaggactcccctgtttaaagcatatggcaagataactcaggagggccagggaaagagggaggctgagcatatgccaaggggagaatggggaatgtcattgctgttgctagtgaatggtgccagggaggtccttccaaggggccacttgccacttggagcttcagcccatgaggccatccttgaaccctgccatgtggctcggcagacagccaatactgcctgaagggggctcagatggaatggcagggctgggctgttgccagtaattggtgttaatgactatgacagtggctttgacatggatgagatggagttggggtacaacccaaagcacactgctcttggcacccgaaagacctgggttgcagttctagcccctcatacctgcaaagattttggaaagttacttagactctctgtgcctgacatctgtttcttcatctgtaaatgaagactggattttttgggagaattaaattagttaacaggtgttcagtgcctagctcagaataaatgctcaatatttgttagctatacttactattattgtctgagccttggtttatatcatctgtcaaatgggcgtgatactatgtcatagggttgttgtaagggttaaatgaaataattaatgtgaatttatccaacagtgtgtgaagggtgtaaagtactcaaagtgagtcaattgaaatggaaaatttcacaaaatacctgcatgtaaaaatcagcggctgagcaggtggatcagctaacatttttggaaagttattctaaaagtactgtcagaggaacctttatctacttatggaaagtggggctcactgcccatggggataccctgtagttattttatgttgttgtattagttgcctattgctgctataacaaatttcacaaacatagtggcttaaaacaaccctaagatgttatcttgcagttctgaagttcagaactcttaaatgggttttgtagagctaaaatcaaggtgtcagcagggctctgtggttccttttgtaggctcttgggaaaatgtctttcattttctgacttctaaaacctgactgcatttcttggctcttggttccttcttccatcctcaaagccagtaacagcatcttccaacccttctccccatcctgactctcgtgtctccctcttacaaaaccatacctagaaaatctgggctaatcactgcatctcataattcctaagttaatcacatctccaaagtccccccgtttttttttttcaagacagagtctcgttctatcgcccacgctagagtgcagtggcgtgatcttggctcactgcagcctccgcctcccaggttcaagtgttctcctgcttcagcctcccaaatagatgggattacagccatgagctaccacacctggctaattttttatatttttagtagagatggggtttcaccgtgttggccacgctggtttcgaactcctaaccttaggtgatctgcccactttgtcctcccaaagtcctgggatcacatgcgtgagccaaccgcacccggcccaaagtcccttttgccatgtaaggcaacacagtctggggattaggccatagacatctttgacatattattctatctgccagaaatattagagtattagattgggcatgatggtaagaaaaactatttagaaaaaagaaagaaatattagagtattagagaaaatgatctaaatcaaagagttttagctcacttctgtttagggcttctccctgtaccctcccagttaggtgagtttgttttcacatctctttttttcttttttttttttttcccagacagtttctctgtgttgcccaggctagagtgcagtggcacaatctctgctcactgcaacctctgcctcccaggttcaggtgatcctcctacctcagcctcccaagttgcaacaccatgccctgctaatttttgtatgtttagtagagacagggtttcaccatgttggccaggctggtctcaaactcttgacctcatgatccacctgactcagcctcccaaagtgctgagtttacaggtgtgagccaccatgcttggctgttttcacatgtcttaaagaccaaaagctcaagaccagaggggtcaaggctatggatcaaatgcttcttgaaactcagttcagaaatggctccttcctgtcctttttgggctttctccctccccttgagtaaccctcaaatttgtttcttttttagatttttgtaaaaactttttttttacagagacagggtctcgccatgttgtccaggctggtctcgaactcctgagttcaagtgatcctcttgcctcagcctctcaaagtactgagattataggcgtgaggcaccacgcctggccagtaaccctcaactttggcccttagaacagtcactgttgccccatcaacagcatttgttgacttttctagctgcttctcctcttccatttctagtgaaatagaaaaaatgccctcatgtccagagcaagatctctgtgaagcaaatcactctagtgacgtttgacctccctgagattcccagacggtgtctgtactagtttcctattgctgctgtaacaagttagcacaaacttagtgacttaaaacacagatttattatcttacagttctggaggccacaattctgaaatggttctcatggggctaaaaatccaggtgtcagcagggagaatttgttcccctgccttttccaacttccagaggctgcacgcattgctcggtttgcttccatcttcaaagccagcaatgtcaggctgcatccttctctcactgccacacctcagatctctcttctgccttcctcttcttcttcttcttcttcttttttttttttttgtttgagacaaggttttgctctgtcgcccgggctatcatgcagtggtgcgatcacggctcactgaaacctcagtctcccgggtttaagtgaccctcttatttaggctcccaagtagctgggactacaaggattgtgccaccatgtctggctaaatttttttttaattttaattttttgtagagacagggtctctctatcttgcccggctgatcttcgactcctgggctcaagcaatcctcctgccttggtttcccaaagtgctgggattacaggcatgagccaccatgccctgacctcttctacttttttttttttgagacagagtcttgctctgttgcccaggctggagtgcagtggtgtgatctcagcttactgcaacctctggctcctgggttcaagcgattctcctgcctcagcctcctgagcagctgggattacaggcgcgagccaccatgcctggctaatttttctatttttagtagagatggggtttcaccatgttagtcaggctggtctcgaacttttgaccttgtgatctgtccgcctcgacctcccaaaatgctgggattacaggcacaagccaccgcccctggcccctcttctacttttgaggacgctcgtgattacattggcccacctagataatccaggatcatctccccttttttaaggtcatctgattagcaaccttaattccctttgccatctaacatcacatattcccagcttctgggaattatgatgtagacatctttggagggcaattattctgcctgccacaggacctgagaaggagttccaaatagtgtccgcctgggctgcctcattcttaataaccacccccttccagaatgtgcacaatggcccactcaagagagaacacctgttaaactcttcaaaatttctcccgcagctctcaggtctctcagtccctctgttggtggaaggatctgagggcaatagagcctggaactgcacactttatttgttaagttaatttttttcttttaaatcagaggaacatataaaaaggtgcacaaatcatgagggaaatctcaatggagttttacaagtgagcactctccactgtcatgtaactgcccccaagatctgcacccatagccccctttggaccccaaataaattatcgtcttcccctaaggcaactactattttaccttctatcaccataggttaattttgtctgctttatcttactttattttttatttttattttgctctctggatctgtgtagagtatttgcctgtttttttttttttttttttttttgaggtggagtctcactctgtcgcccaggctggagtgcagtggctcgatctcggctcactgcaagctccacctcccaggttcacaccattctcctgcctcagcctcctgagtagctgggactacaggtgcccgccaccctgaccagataattttttgtatttttagtagagatggggtttcaccgtgttagccaggatggtctcgatctcctgacctcatgatccacccgcctcagcctcccaaagtgctgggattacaggcgtgagccactgcgcctggccgagtatttgcctcctttttaagcaaacttctctttttttcttttgagacatggtctgactgtcgcccaggctggagtgcagtggcatgatcctagctcactgcaacttcctggctctagccaacctcccacctcagcctcccgagtagctgagactacaggcatgtgccaccacgcttggctaattattgtattttttttttttttttttttgagacagagtttcgctcttgtcacccaggctggagtgcaatggcgcaatctcggctcactgcaacctccgcctcccaggttcaagtaattctcctgcctcagcctcccgagtagctgggattacaggcatgcaccaccatgcccggctaattttgtatttttagttgagttgggatttctccatgttggtcaggctggtcttgaactcccgacctcaggtgatctgcctgccttggcctcccaaagtgctgggattacaagcatgagccaccgcgcctggacaattcatgtattttttgtagagacagggtctcacaatattgaccaggctggtcttgaactcctgagctcaagcaatctgctcgcctcagcctcccaaagtgctagcattacaggcttaagccactgcgcctggcctacaaacttcttattgacgtatacatacaaaaaagtacactaatcaaggaagcagctggattagttttcatgacataaacccatgtgtaaccagcattttgatcaataaatagaacattgccagcacccagaatccccgctcaggctctttctgtgcactaacaagccaagtctaaccacaatcctgattcctatgattgtggatacattttttccatttttgaatgttattttgttcaatgttatatttgtaaatttctcatgtaattaatatgccgtaattaattcttttttattgctgcgtaatatcccattatatggccacaccacagtttttctgtactattgttaagggctgttgagattgtttccattcacacttcttttttttttttttttgagataaggtctctgtctgtcacccaggctgaagcacagtggcatgatcgtagttcactgcagcctcaacctcctggtgctcaagcaatcctcccacctcagcctcccgagtagctgggactataagtgtgtaccaccatgctcagctaatttaaaaaaaattttttgggggggccaggcacagtggcttatgcccataatcctaacactttgggaggccgaggcgggcggatcatctgaggttgggagtttgagacctgcctgaccaacatggagaaaccctgtctctactaaaaatacaaaattagccgggcatggtggtgcatgcctgtaatcccagctactctggaggctgaggcaggagaattgcttgaacccgggaggcggaggttgcagtgagtcgagatcgcgccattgcattccagcctgagcaacgagagtgaaactcagtctcaaaaaaaaaactttttttttttttgtagagatgaagtctcactatattgcccagactggtctcaaattcctgggctcatgtgcttctcccacctcagcctcccgaagtgctgggattacaggcatgagcttctgctccttgcctacttcattttgaaagggagtgactacctacccatatctcagttgtcataaatgcaattccacctgcagaaattcaggaagggaagattgtatttagcactggtgccaaatgcattcattaggagagacttaaaaacagtctactggttaggattaagttcagctgcaagttacagaaaaaatgaaatgacagtgggttaaagaaagaagtttatttctgtcttgtgttcaagaagtctggagacagtgagtgtccaaagtgtatgtggggtaaggccccatgccctgtgcctggttgcttttagcatgcatagcttccatttccatgcagtctcacccaggatttcgggatgactgctgagtactaaaccaaaaaacaaaaacaaaaacaaaaaaaaacaaaaccgatgttagagaggcaggtaaggcatttgaaaacattgttttatggaaaaaaaaagttatggaacatttataaaatgaaaaaagcagttttttctaaattaacacattattttataacttaaaatgttttaaatatgtatttgtgacttaactgatacattattataagtagatacttgatatttcatctatatcctttaaaatattcaagctgaccaagaaattgtatgtggggtcttccaatcaggaaaaataggagccaggcacagtgcctcacacctgtaatcccagcacttgggaggccaaggctggaggatcattgagcccaggagctcacggccagctggacaacatggcaaaaccccatctctacaaaaaatacaaaaacgtgggggtactggtgtagtctcagttactggggaggctgaggcaggaggattgcttgagcccaggaggtcaaggctacaatgagccattattgtgcaactccaacctgggcagcaatgcaagactctgtctcaaaaaaaaaaaaagaagaagaagtccaggcatggtcgctcatgcctataatcccagaactttgggagagcaaggcgggggaatcacttgaggtcaggagttcaagaccagcctagccaacgtggtgaaaccccatctttactaaaaatacaaaaaattagctgggcatggtggcgggtgcctgtaatcccagctacttgggaggctgaggcaggagagtcacttgaatctaggaggtggaggttgcagtgagccgagatcatgccactacactctagcctgggcaacaagagcgaaactccatctcaaaaaaaaaagaagaagaaggaagatgttatcctcctattacagtcgcctacattcaggcaaacatagtacgtagaggaagacatggacttgactttggtactttttggatgcagaaccagggccattttgcttcaactaatattttgttaattaatgaaagatcaataaatatgtttgttcaaattaataattttaaaaaaatttattcacacaatttggtacctagcacaagaagcaaacagaggtgacaaggtgcatgctgcagcagacaacaaacccattgtcaggggtctatgaagcagtcagttctcattagaaaaccgagagaatattttacagcatgagtgacatgtgagctgaggcttgaggactgaatgcaatttcgatgaatgtagaatgtagaaatttcagggtgagggaccggcatggatggaggcgccccgctatgacaagagtctgagttcttcaagccctaatggggaggctggggtggatgtgggggccaccatggtcagagaggtgggcagtggccagtcaaggagggccttgaatgttaacattgcacagtgaggccacaggcagattcaaaatcacaagggaagggccagtagatgagggacccaaggcagggagggcagttctgaggctcctgggagtctggctgagaaagggtgtgggtagaacattcgctgcagcagtgggaactgtcaggaggcctggacaggggagctgtgcagaggtgggaacaccagaatttatccactcacaaatgtgttgaggatacagaggacacgtggaagctggctcccaaatttctggcctagatggctgggcagatggggttagcatgaccatgaaaggatttgaggaaaagatgactttgtgtctggacaggctgaattggcaagcaggcctgcaccactgggtggaagttacagacagcatcaggtcaacatcgcggagaactgaggtctaacatttagagctgcctgaagattgtggatggccttgaatcctagccagaggttgtcttcccatttgctagggattccaggattaggtggaagacaggaaggtacagcctgaaattcacacagctccagtattgtatgattctctgtgaactcatagaacagttggtgtgcatacctggtatgctgacaaagagatctttggcaaaactattgagcctgatgtctaggaatttatcgttagaaaaatctttctttctttttttttttttttttgagaccaagtcttgcattgtcacccaggctgcagtgcagtggcgccatctcagctcactgcagcctctgcctctcgcgttcaaatgattctcctgcctcagcctcccgagtagctggaattacaggtgtgcaccaccatgcctggctaatttttgtatttttagtagagatggtggaacaggaattaaaagaaattaaagaatatgtgtaagcagaagctcagttgtatataagaaaactcaattccccctgagaaagagaaagagctggagtcctttaaaaattaactgcctgtttttctgtggctagtgagccttatctctcctcctctcccaggcattgtgaagaccctgtttctctagctgtgcagctgcaaggttactagacagataaactcaagtcataaaacatgtttttccttggaaagtaagaaatgatgtaatgcatgtctctcaattaattgaattattgtctttgtttcttgctgtaatatgcttccccctgcacagatctccccacaccccacgaaatgcttaaaagctaacttaactctttgttcagggctcagtcctttggatgttaatccgactgggctgatgcacacctaaataataaatatcctcctcaaccccattggtctctctgattccttaaaaaatcctgctacaatgggatttcaccatgttgtccaggctggtctcgaaatcctggcctcaagtgatgcatccttcttggtctcccaaagttctgggattacaggcatgagccaccatgcccggcctgaaaatcttattcttaacaagtagactgactgcctgagaggtgccagggtagaatattgtctctgccagttaacaagttctgaggccttggagaggtctttccacctataaatcttagtgttccatccatcaaatttggaactcatccacctcacagaatgattgtggggatcaaatgagatgatactgtgaaaaatgcccagttcactggctgtcccatccagacacttaataaatattagtgtcctgtcccctttctctttttgtctggaggtggggttaccactggagaggggatcttgccaccttcttcaggatagcaggatcttgccaatggtctggtttagattgagaaacttggctcccaggccatgcctcttattttatggatgactagttaaagcccagagagttgttacctaggtgaggtcatgcaggtgtgcagaaccaggcctctggtctcaaggcccacaccatacagttctggctctggagggaattctattcgcctgtggatttacttgcaacagtgatgcttagaagaacccgtagttaagacagaataatcttctctctcttcccccacccccttggtgaagttaaatgaaaagactcattgtcccatggagaagagaaaaactgttaaaacaaaagtcaaagccgttgtattattttaaaatattctttccatgttcccaaatgcttcatggaatctgttcggactgaattaacctctctatttctcagcacagaaattcttctcagatgcccaaaaatgaaaggaactgttctcaaatatcattccattttccagttagaaatgggtcctgatcttcaaatgctgacagctgtaaatgccaaactgagaaacaaccattgagatggatacatgcactgacttatttttttcttgtttcactgccattgcagtttttaggaaaaaatctatcttgtctggtactgatattgccacactgattttatgttggcatctatatggtatccttttcccattcctttattacttatcttttttttttttttttttttttttgagacagagtctcactctgttgttgcccaggctggagtgcaatggtgtgatcttggctcactgcaacctctgcctcccgggttcaagcaattctcctgcctcaccctcccaagtagctgggattacaggtgtgcgccaccatgcctggctaatttttttgtatttttagtagagacggggtttcacaatgttggccaggctggtctcaaacttctgacctcaggtgatctgcccgcctcagcttcccaaagtgctgggattacaggcatgagccaccatgcctgacccttattatttgtctttttcacaagcccacagttaacatcataattcctttttttaatgtattatttttaatttactttctttaaaaatattttatattaaaaatatttctacttaaaggaactttagaagatttcatgttagttttcaagtcactgtaagattttctttctttttttcttttttttgaggccgggtcttgctctgtcacccaggctggggtgcagtggcagtgatcatggctcactgcagctttgacctcctgggctcaagcgattctcccacctcagcccctccctcgagtagctgttctaagttttcttcctttgtgccaccatgtctggctaatttttgtatgttttgtagcgatgggatttcgccatgttgcccaggctggtctcctgggcagcatgacctgcttaccttgacctaccaaagttctgggattccgagtatgcaccaccgtgccgagccaaggttccagtttcttcacatcttcaccaacacttggttacgtcagtcttttaaaaattgtttttaaattttttcatattcctaggtcactattatactcttttcaatatactcttttcaattttatctattccagcagatttgttgtggcgtcttattgtgcttttaatttgtatttttctaatgactaaagatgttgaacgtgttttcatatgtttatttttcatccgtgtatcttctttggtgatgtgactattcaaatcttttgcacattctgaagtgggtttatcctcttctaattgagtgataagagtttacatagtcccggccaggtgctgtggctcatgcttgtaaacctagcaccctgagaggccaaggcaggcagattgcccgacgtcaggagttcgagactggcctggccgacatagtgaaacctcatctctactaaaaatacaaaaattagcctgtagtcccagctactcaggaggctgagacaggagaatcgcttgaacccaggaggcggaggttgcagtgagccaagattgcgcgattgcactccagcccgggtgacagagtgagactctgtctcaaaaaaaaaaaaaaaagtgtatatagtctggatagaaataatcgatcagatacatattttacaaatattttctactagtctgtaacttgtcatgccattgcactttgtttgtttgttttgagacagagtctcattctgttacccaggctggagtacagtggtgtgattatggctcactgccacctcgacctctcgggctcaagcaatcctccagtctcagcctcccaagtagctgggactgcaggtgtgtgccaaccttcccagctaatttttttttttttttttgagacagagtctcactctgtccccagactggagtgcagtggcatgatctcggctcactgcaagctctgcctcctgggtttacaccattctcctgcctcagcctcctgagtagctgggggactacaggtgcccgccaccacacccggctaattttttgtatttttagtagagacggggtttcaccgtgttaaccaggatggtctcgatctcctgacctcgtgatctgcccacctcagcttcccaaagtgctgggattacaggcgtgagccactgtgcctggcctaatttttgtattttttatagagacagggttttgccatgttgccctgccttcgcctcccaaagtgctgggattatgggcatgagccactgcaccccagccttttgccattacattttgataaaaagaaagttttaaatatttttagatactaatgtgtatttaacaattatgggtttgtatgtcattattaggataatatacataagtaagcataaaatctgtctaatatacattaagtggcttaatatgacaaaattagcagtgtatactttcttttttttctttttttttttttctgagatggagttttgcttttgctcttgttgcccaggttggagtgcaatggtgcaatcttggctcattgcagccttcaccttccgggtttaataaattctcctgcctcagccttccaagtagctgggattacaggcttgcaccaccatgcccagctaattttgtatttttagtagagacgggatttctccatgttgatgaggctggccttgaactcctgacctcaggtgatacacccaccttagcctccaaagtgctgggattacaggtgtgagccactgcacccagtcaacagtgtatactattgattggtttgattacagaataataccaaaaataataacagcaacaacaggccgagtgtggtggctcatgcctgtaatcctagcactttgggaagctgaggtgagtgaggagttcaagaccagcctgggcaacatgatgaaaccccgcctctactaaaatacaaaaaattagctgggcatggtgtggcgcaccggtagtcccagctactggggcggctgaggcatgagaattgcttgaacccaggaggcagaggttgcagtgagccaagatcgtgccactgcactcctgcctgggcgacagcgagactctgtctccaaataacaacaacaacaacaacaacaacacggaatagctaacacttaaattcagcactttctatgtgccaggcagtgtttgaagtgctttaaatatatctacatatgaaccgattgattctatataacaattaggtctactgttgtctccgttttaaagatgaggaaactgaggtcaagagagggtaagtaacctgctcagggttggacagctagcattattttgctttgtttatttttaactcctcactcttcacctatcctcagtgccttttggttagcaatggtgacttgaaaatacaaacatttcttgaaatccacagtaaacccaaaccacatgcaatgatgtttgttttttggaaatgatcacacaccacatcatattccaagtgttgagtgcatatgcctcggagtggaagtgggccttgagagcatgttgtatacattttgaaacaaataagcctggactttttatctgctcggtttggagaaaggggaatagcaataaaatcataaatcacatataaatgatgtaacacactgaatagtgttttataaaataaggtgagggcatgatggtgcacacctgtagtcccagctactcgggaggcttgggtgggaggatcactggagttcaggagttcaaagaggcagtgagttattgtgccactgcactccagcctagatgacagagtgagaccctgtcctcccaccactaacaaaaaccctgagatgataaatagcaaggcagcttgaaagtaaatagtaagtttaggatttgagaaaggggcaagatgttctaagttttcttcctttgttcagaaggaatctcagagttaaagctatgaaaagggaccaatctaattagtaaagagtttaaataggctgggtgtgttggctcacacctgtagtcccagctacttgggaggctgaagttgggggatccctcgagcctgggaggttgaggctgccgtgagccatgatcacaccactgcattctagcctgggtgagagagtgagaccctgtctcaaaaaaagagtttaaatggtttaaaaaggggggtgaggagagtagttatttgtaatgagctagtgcaggggtccccaacccccacccggaattagtccatggtctgttaggaaccaggccgcacagcaggaggtgagcagtgggcgagctcagcttcatctgtatttacagccgctccccatcgcctgtgttaccacctgagctctgcctcctgtcagatcaccagcaccgttagatccattagattcttttttttaaattgctgctgcacaaattaaggcattagattctcataggaacatgaaccctatcatgaactgcacactccttatgagaatctaatgcctgatgacctgtcactgtctcccgtcacccccagatgagaacatctagttgcaggaaaacaagctcagggctcccactgattcctacattatgttgagctgtataattatttcattatatattgcaatgtaataataatagaaataaagtgcacaataaatgtaatgcacttgaatcatcccaaaaccacccccacagctgggtctgtggaaaaattgtcttccacaatattggtccctgatgccaaaaagattggggaccactgagctagtgggttctggaacttcacctcttatgagcgatgtaaccttgggcaagttacttctctgagatactctataaattaaatcacttaatacgttgaaggcacttggcccagtgcctggcacataggagatgctgaataaacattcactatttttaatataatcttaatgcatagtaaaattatattaaaaagagtgagctagttcaatacagcaagtgtgaaaaactggactctgaaggttgacaggcccaggtccattcccaggtcaatttctggaagcaatttgctgaacaaacagttcgctgaaatagtgaggtttttttttaagttttgaaacatggtccctgccccacccctgccctgtccctgcctctgacaaagaaagaactatggcatttcatgacttgatttctggggattttcctttcagttttctactaatcaatgcattggaaaattgacctgctagtcctgggtttgaatttgttttacctttttttttttttgagatagggtctcgtgctgtcacccaggctggagtgtagtggtgcagtctctgctcactgcagtcctgggttcaagtgattcttgtgcctcggcctcctaagtagctaggactgcaggcacgagccaccacacctggctaatttttgtatttttagtagagattgggtttcgctgtgttggccaggctggtctcaaactcttggcctcaagtgatgtgcccaccttggcctcccaaagtggtgggattacaggtgtgagtcaccacacctggacttttttaactttttaaataaatttaaattttttttttgtagaaacgaggccttgctgtgtggaccaggctggtttcaaacttctggcatcaagcaatccttctatctaggcctcctaaagcactaggattgcagacatgagccatggcacctagacttgaccctgggtttgaattctggctctgacacttgctaactgtgtgtgaccttgggcaggccactgacccttcctgagccttatgggaatgtgggaataatattaggtaatggagcaagttaatataggtaaagaatttagaatagggcctggcacatggcctcagtctagtaccagagtccaagcccataaccactgtgccaacactcttgtaataaatgtatgtgggagacagggaggctgggaggctggatatgtgatgctactttatgtcaactacacatgaattttatatgtataatttatataaactaattgatgccatctactattattagactgaacaaatattgttacttggaactctcagatatgtaatagcttttttttattcaaatccaaaatgtaaaatgtgactatgagtaattgataatgaacttaactgataagaaacttcaggatagatttttctcaagttttccattcagtcttacagtgattaaagtgatgaaaaattccaactatgcatgccctgctcggagcgtccaagaagagcctaccaacgggggctacttaagctctcaaaggccaaacacacaaacggcattttgagtgcaagtggtctgtttgaactctgaaaaggcggggcagcgggcctgcagctcctggagttcagggagacccggaaatctcaccctgccctcttcttgtgttgtgtttgtcacagccttgcccctcttgctcgccttgaaaatggaaaagatgctcgcaggctgctttctgctgatcctcggacagatcgtcctcctccctgccgaggccagggagcggtcacgtgggaggtccatctctaggggcagacacgctcggacccacccgcagacggcccttctgggtgagtggtggtgctcacccccaaaagtgggcaggtgggggtggtttggggagggctcagggacagggattggtgactgtttgagaagctttcctttccctgggtccttgttggatgtgctgggcctggggtcctcactggtggtgaatgcatccggagttgagcacgtggttgcacacgagttttcaaaataaacttttctttgaagcctttaattgaatctgaggcttatggcttttctccaatattcagggcaagatttctcatctgaaaatgtccttgttgttggacctatctgagcaaaggtgttatgaaaattttttattgggtttgcccagctagatctgttaataatgcttccctgcatggcagcagggaagtaagagctgggccagaagagaggtggggacattgtgagctgaatcgaggtattaggaatggaaaatgccaggggtctattcatctgatccagtgaacatttttcctagaaaaaggaaatgtcatgaaaacacacggaaaacatgtaaatcagctgattctaaacaagggcattggtaagcctggcatgtggaggttataggaaggttgggcagtgccaagagaatgagttttggcattgacctgggttcaagtcctgcctctgctactttccagatgtgatataacctccctgaggctatagatgtgatataacgtaggtgatataacttccctgaggctcagttttatcatctgtaaaatggaagtgtgaatgccaaccttggaacatttctgagaaataaatgaggtaatatacatacattctaggtactcagtaagtaaaagctttaccacaactgtcattctattaagttctttgaaactgtatttgacatttataccttgttggccagccactcgaatctgaccccctgcaaaggctactaagagaactgcccagtgacctggtagcctcagtggcatccgaaattacaatcagggaccacagggacctaaagagccctgttttcagaggtcagaatctttattgatgttaactaagtgaggaccccagtgataggtcttccaggttcctgaaagtccttgtttccatagtgatgtaaacaacacttttgcaaatgtgaaaaggagtgggaagtgtttagtatgttaattgaaacgttttaaaaaagaaattccaagatgataaacaacatctctctctctctctctctgtctatatatatatatatatatatatatatataaaactgatgatgcacacaatcttggctcattgcaacctccgcctcctgggttcaagcacatctcccaccacagcctcttgagtagctgggtttacaggggcacaacaccacgctcagctaatttttgtatttttagtagagatggggttttgccatgttggccaggctggtctcaaactcttggcctcgagtgatctgccatctcgacctcccaaagtgctgggattacagacatgagccactacgcatggccaagatacctgatttctggatcaccagcagtaactgcccagttgggtttctgatggggctggtctcaggaaaagccaccacacacttgcctggaaaagcacactgcttctctaggctccaagtctctctctccctcccttcctccctctgatacacacacacagaccacatcacccccaccttccctggttgtcagcattcactgtcgtcctcctttgcctagaagcccattttgctaaaggcaccaaccctgcatccagcattgattccttcttctcatttttcaagagaatgtgtcagagacaaagaggaggatggggcacaacctatctttcccaccccaagactggaagtgggcatgggtgttttcactccgtgagctgtgcaagtggctgctcccagatatgctggagggctgcttggcttatgaaaatggtggagtgggccggacatggtggctcacacctgcaatcccagcactttgggaggccgaggtgggcggatcacaaggtcaggagttcgagaccagcctgaccaacatggtgaaaccctgtctctactaaaaatacaaaaattagctgggcatggtggcgggtgcctgtaatcccagctactcgggaggctgaggcaggagaatcgcttgaacccaggaagtggaggttgcagtgagctaagatcgtgccactgcactctagcctgggtgacagagtgagactctgtctcaaaaaaaaaaaaaaaagaaaatagtggagtgacaatcgtgaaaccagaaagcaaacactatagctgtggcctggattctcaagtgcaatctgcttttttttttctcattttgatggggaacaaaaatggaaaagcatgctcattggtagtccttgccccgagggtatgaccttctcttcattcttagaataatgtagtgttttgtattttatgcatgtttgcttctcttggctcttggactatttgttcagaatatggcccaggccacatttcactttttaatggcaaatcattttggctgaagttatggcatccactggcatgatggattttactggttatttgcttgcaagtatgttcctgaaagtttaacagagtagaaacagcagaattgtttcttaggttaattttttttgaactttctgggttttaaaaatgtttatcttttatgtttaaattcaggtcagagtctcagtaacaacttgagtcagtttgaaaaaataacgcatgtatatatccaccatcctgtgaacatctgtgggctgttcactcggcagcctgtgatgtctgtccacatgggcttatctcttacctcattcatttatctggaatttctactctgtgccagatgccggttgggggtgtgggggtagtgtttaagatgaatagacaccatcaggaggtgcacagagtagtggaagagacaggcatgtgaaaagatcattaatttggtagaatcggtgtgcaaaagtagaggcatagctacattatagctcaactctgcctgctgagcaggcttagtgtaaggcagtggttctcaagctttggtctcaggatccttccttttacgctaaaaattatttttattttattattttattttattttattttgagatagggtctcactgtctcccaggctggagtgcagtggcatgatcatggctcgctgcagccttgacctcttgtgcttaagcaatcctccaacctcagcatctcaagtagctgagactacaggcacatgacactacgcctggctaatttttgtattttttgtagagacagggtttcgccatgttgtccaggctgatcttgaactcctgggctcaagcgatcctcccccctcagtctcccaaagtgctgggattctaggcgtgagccactgtgcccagccaaaaattattaaggatcccaaataacttttgtttgttttttaagaatcctgaggacaatcaagggagctttgtttatgtgggttagatctattggtatctacctgatcagaaatttaaaaataacaataataaaatcagaatgtgttaacaaactatatatgtataaaaaactatattttctggccaggtgcagtggctcatgcctgtaattccagtactttgggaggctgaggtggaaggatcacttgagcccaggagtttgagaccagtctgggcaacatagggataccttgtctctacaaaaataaaaaaatgaggccgtgcacagtggctcacacctgtaatcccagcactttgggaggctgaggtgggcagatcacttgaggtcaggagtttgagaccagcctggccaacatggtaaaaaactgtctctactaaaaatacaaaaattagcctggtttggtggtgtgcacctgtaatcccagctactccggaggctgaggcaggagaatcacttgaacccgggaggcggaggttgcagtgagccgagatcacaccactgcacttcagcctgggtgacaagagtgaaactgtctcaaaaaaaaaaaagaaagaaaaaaaaaaattagccgggtgtggtggtacacacctatagtcccagctaattgaaatgcttaggctgcaggatcacttgagccccagaggtcgaggctgcatgagtgagccgtgatggtgccactgcactccagcctgggtgacagagtgagaccctgtctcaaaaaaaaaaaaaaaaaaaaaaagaagagtagcaccgttttacagttttgcaaatcttgtaacggtctggcttcgtagaagacagctagattgtcatttcttgaccattcaatctgtcatgaaatgttttcgttagattatatgaaaatgcatggatatgtagttggaaaagggaagagcatttaaatagccttttcatataattgtgaatgttctttgatactacaccaaaacttgacaaagagtagtttcttaaagtttagttgcaatgtgaaatctaaaatcagatcaataaactttttgttctctatatacccacaagagaatgagagtatgaaaggcaaacattcatgttattatggaaatagttctgacctcatggatcctctgaaaaggcctcagggacccctagaattccccaaactacacttgagaatggctggtttaagagaattgttcccagtgaaggtcctgcccacggagagccctgtgggacagcaggtggcagaggcatgaggatggagtgtggcagtggggctccgatgtggcgctgggtctgccagacaggtggtctgagctggagataaggcagcaataatttaggacctcgagggctccaaggaaggagttttgagcttcattttgcaggggtaggagctgtggagggctttaagcagtcaacagtgggtgtcgctttgtctttgcacccactgtactctccggacagacttgaccttcctgggttgtggcaaagagcagggatctaaatagcaggctgcaacaggagaaggaacgagcacctgctctagcccaaagacccctccaggccacaacgctggcaggtagagtcggagaatctgactgtgctgtacccagaaccctttggacttggattcttccccttgaccagccttatcagtggcacccatccccttccacactcctcgctaggccctcctcaagggggcgctaactggaaggcatgctgccccactgctaatggccgcctgcttcgtttgtgcacactttttctctttgttaccccactttcctatgaggaggtggacctgtctccagaacaaccagtggggtatatcagcctttttggaaaccttaaccctccttgcccaaactcccagagtattcttatttatttatttatttatttatttatttatttatttatgatagagtcttgctgtgtcaccaggctggagtgcagtggtgggatctcggctcactgcaacctccgcctcccaggttcaagtgattctcctgcctcagcctccagagtagctgggattacaggtgcctgccaccacgcccggttaatttttgtatttttagtagagacagggtttcaccatgttggccgcctgcctcggcctcccaaagtgctgggattactggcgtgagccgccgcacccggcccccagtgtattcttgattccctccactccacaaactactctacagtcagccagcttgtggtctctggtggtggtctgtcttatgaggtcttgttgacatatgcattcttttctaaatttaccaaactggctcattttatttctgctaactaaacttgaaagccttttcttttcctattatagactctcctttggatcaatactacacactcagaagttatgtttgtgttttaagagagcattttgtggcaatatggcatcaattctagaagtgggagacaaagatttaaaaggaagttggccctgcagtctggtcaggggatggtagggcctgagctccctcccaccccacaccccaccacacacactgctggaagaattccagaggtgttccagggtagacaccacagcatttagtaaaatttactcataacagttaatttactacttaaaaactaatgaagaaaatctaagaattcaccttttttttttttttttttttttttagacaggatcttattctgttgcccaggctggagtgcagtggcactatcatagctcactgcagcctgagctcaagcgatcctcccaagtcagcttcccaactaactgggactacagtcatgtactaccacgcccaactaattgtttaatttttttgcagagacagggtcttactatgttgcacagactggtttcaaattcttggccttatgcaatcctcctgccttggcctcccaaagtgttgggattacaagtgtgaaccattcctcctggcagaattcaccttacacagccccaaattctgctcttggggaatcacagtgtattaagagacacttattttcatttttgcatgtatctctaaacctgacatcaaaatattcataaaattgcaatacgtttcatataatgagctgaaacctcctaagtgagcaatgtgaagttgttggctgcctggagaattaaatgtaagcatggcctgctctgtgttgctaatggaaatttttacctaggttgatatttattaacccccccttttttttttgagacagagtcttgctctgtcacccaggctggagtgcagtggcgtgatcttggctcactgcaacctccgcctcccgggttcaagcaattcttctgccttggcctcctgagtagctgagattgcaggcgcccgccaccatgcccggctaatttttgtatttttagtagagacggggtttcatcatgttggccaggttggtctcaaattcctgacctcatgtgatctgcccacctaggcctcacaaaatgctggaattacaggcgtgagccaccgtgtctggctccaacctacatttttaaggcttagctgccactcaatggatttctacatcccaaaacaatacctttaattgacttttattggcctcctctgtgaaggacggaaagcagatgccagaagccatgagaggctctggctctccgaccaacccgtggaagccactagtcttaaatttcctgaagccattttgccatgattaaaacttttgtctccttccctgagctttccagagctttgtccattctcttccttctacctggaatatccttccccagacaagacccattctcatccagggccaggtcaaatgccacctcctccctctccaggcaagacctccattgagggaccacacacattgcaggccctctgccaaagtgccaaccctctctgccttacattccaaggggtaatagtgatacttacctcagagggattcacattttagctatttttgcacttgtctcattttactactagactgtctcttcaagatagggactgaatatttttcatttctcatagcacctatgaaaggcaactctcatttactgagcccctgctgtgggttgggacgtgttatctcacctaatccatagcaggagcaaacactgtaaggtaattcttgttatattctattttcagacaaggaagctgaggctcagataggttaagcagttttggcaaatttgtcaagacttctgcaaacctagacagaaaaggtgctcaacccccagcccctttatggaaaggatgcatggcttaggggcagatatgcgttggagcaaagagaaagacacgcgtactcttgaatgtactattttagcccctgcttgctccttgacccagagtttttgtgtagaccatagaatgccctgcccatctgtatttggaggtgctgctgcagccggtcacacctgggttctactgacctccagccctggctgtggtcctgcccagggctcagtgtgtattgaacaagtaagtgaatgagacatgcagaaggctgatttcattcttatttgaatgatttcaatcttgattaaccttcttagcaagaggttattttcttctcctggacctcagttcattcatctctaaaagaaggaagttgaagtcaatgatctctcaggtctcatctcagatgtggtgatgtcaccaattcccctgacatcccttctatgtgggaaccctgatgaaatccgcagctttccctcactgtgtccaggtaggaaagccaaggaggaaccatattctggaagccaaggaaggagaagttttgagacacagggtggtcagtaggatcaggcaggacaacagggatggggcagtgggatcaggtaacacagcagggctgggcagtgggttcaggcagaacagtgggctgggcaggggatcaggcaacacagcaaggttaggcagtgggatcagataatgcagggctaggcaatgggatcaggcaacacaacagggctaggcagtgggatcaggtaacacagcagggctgggcagtgggatcaggcaacataacagggctgggcagagggatcaggtaacacagcaaggctgggcagtgggatcaggcaacacagtagggctgggcagtgggatcaggcaacatagtagggctggacagtgggatcaggcaacacaacagggctgggcagtgggatcaggtaacacagcaaggctgggcagtgggatcaggcaacacagtagggctgggcagtgggatctggcaacacgacagggctgggcagtgggatcaggcaacacagtagggctgggcattgggatatggcaacatgacagggctgggcagtgggatcaggcaacacaacagggctaggcagtgggatcaggcaatatggccgggctgggcagtgggattaggcagtgaagcaggggttgttaaacttcattgtgcatcaaaagctcctggaaggcttgttagaacacagattactgggccctgtgctcaaagtgtctgattcagtaggtctgggttggagcctgataagtggtattcctggaaacctcagtttgagaactattactgtagagaaacctacaaggttgggtgggaatgggcaggaggaaaagatactagaagaagatgctgtggggcatgagccggaaagacaatacaagatgagtaacatctgcagagaattgcagctgcagagtataaactaactgtaatctaggtccagcccttctgaagctttacaaataagctgctagcattgtccagccttatagggaattggcaaaaggtgagtttcaggcctacatgggagccagcctcttacagcacagcagttagcaatacacatctaaagaactaagtagctggcatgtgtctttatcatcagaatagattatacaaatgaaggtcgatgcattgagcttatcaaattgttttaaatatagcaacgtttgttttaaaatttttttttaaacctttgaagtaaaactgcctctttttcagtgctcagctgcagtgcatcacgggcagtacaatgacagctggaaacatggaccccatggaggcgctgtcatggccgccctcagcacagacctgctgttccctatcaaattcatcctctgtgcctatgctctgtttaatatagatttttataaactgtatgaagtaaaattcttcattcctatcttgtgattaacgctggaagaatccaaaaagcacagcgtctgacctccaataagccataaagttaaaagcttttctaggcaatgaatatataacctgatttttttctcctacagatcctctctctccccttctttctccctttctcctttgtgtgaaactctttctttatccctttccttttctataaacttccttgatctttccctctccagtaccccccttcctcattcccttcttcagttccaggatgttctctcctcagcttgcccatatattttgcacctgcaactcatgtgtgtgtcagggagtagaggtgagggattatcccttccgtgagtgacagtcacctttcttttctttgctggctggtgcttttaggagacaaggtgtacaaccttacccctaaggagccagtcctgtccttcgtctctctatctaatgctaataatgataacaatagtagtgatgacggccgggtgcggtggctcatgcctgtaatcccagcacttggggaggccaaggtgggtgaatcacctgagatgaggagtttgagaccagcctggccaacatggtgaaaccttgtgtctactaaaaatacaaaaaattagccaggtgtggtggtgggcacctgtaatcccagctactcgggaggccgaggcaggaaaattacttgaacctcggaggcggaggttgcagtgagctgagatcacaccactacactccagcctgggcaacaagagtgaaactccttctcaaaaaaaaaaaaaaaaaatagtagtgatgacaagccaccatgtgccaggcactgtggtaggcagctcacacttcactctgcatgtactattatcccttaaatgtctcatacaaggtcattcaactactgagcagccagaggtagaattcaagaagcgaacttgctgttttctctacttaaactcttttatcacccaggctgcagtgcagtggtgcgatcatggctcactgcagcctcgacctccaggcccaggtgatcctcctatctcaacctcccaagtagctgggattacaagcacgcaccaccatatccagcaattttttttttcatatttttttgtaaagacagggtttcaccatgttggccaggctgttctcgaactcctgagctcaagcgatcctcctgctgtggcctcccaaagtgttaggattacaggcataaaccaccacaccccgccttcttgaactcttttctataaccccacccaccctgttttatccagttgaattggactcatctttcaggtctcagtggaagcgcttctaatcttctaggttgggatttaataccccaactattgcattcccatggagtgctgtatgtccccaaaactgcacttagcctgtacagcaattgcctgcttaattgtctgtgtagttcgtcactgtaccagcatagctgagcaaggtgcctggtacacagcaggtattccataaatgcctataggaaaagtaaattaacggactcttcctcaataaatatatatatgttctagaaatttgagttgtatattagtttcctagggctgctataacaatataccacaaagtgggtggttaaacaacagaaatgtattgtctcacagttctggagctagaagtctgagctcaaggtgtcggctgtgttggtttcttctgagccctctctccttggctcataggtggctgtcttctccctgtgtctccacgtggtcttttccctctgtacctgtgagtgtccagacttcctcttcttataaggacaccagtcacattgaattaggctcgccctaataacctcattttaacttaatcacatctttgaagaccctaactccaaatccggttacctcctgaaggcctgggggtgaggacttcaacatatgaatcgcgggcagggagagggacagaagtcagcccatgacaagctgctttgcttttcactttcccagtttgtggaggacagtgtgtcatctttcaacatgtttctaaatagcctctttttcctttctgattcactttatgttcccacttcagggtgatatgagaaacgctggggaagcatgttcaaagacttgagcagtgggtcacttattactttaccatggcatatttcagagtcattaaagcagctccagcaagcgcagtgggctgtgcagccggaatcccagggctgaagatgggacaggagtgcaatctaaccaggatgtgaaaccaagtccaagtaaggtttttcaaaagccaagaattagaacgactaactcagtcctgtttcagtatatccaggggaggctgatttatagggaaagatgaaaggaggacaatgtgtatattttggctgctcagaagaccatggggctagacatgggggaggaggaagttattataagcctacagccagccaatgagtaagaacatcaaagaggaaggctggttggccagatggaccaagagctggggcacaggcaggatctttgggagaaacaagatgaatggatgcttcggacaacctaagttcagagcccggaggggcctttagaaaggcatgatggattatgtgtactgtgggtcattgcgccatgagaagtcccatgggggatgagccccagaggcccttaaagtcagggtggaccattaagtaaactgcggaggaatttcttccaggagggctcagacttggcaaaggctgggaagggctgctttccatctccggctcttaatcccccagccctgacactggggctcgcttgttccagcctacttgatccatttattgaataaagatatactgagaaccagccgggcgtggtgactcacgcctgtaatcccagcactttgggaggccgaggtgggcggatcacgaggtcaggagattgaggccgtcctggctaacacggtgaaactccgtctctgctaaaaatacaaaaaattagacgggtgtggtggcgggcacctgtagtcccacctactctggaggctgaggcaggagaatggcgtgaacccagaaggcggagcttgcagtgagccgagatagcgccactgcactccagcctgggcaacagagcgagactctgtccccgcccccccaaaaaaagatatactgagaacccttttattccaaggtctgcattaggcccagtgaaagatgaggaatccttaaatctttgggacttggtggggtcaccggggatacatcctcctctcctaggtaccgttcatctgtttgcacccagatgtggcctgtcccatgtgattgtcccaccactgaccgaagcaggcctctccattctcctcttccagttaaagctgaatttgtctccaaagtgaagaagaataggaaaaccatcaattttatggagctttttaactatgccaaaatggtttcattctgatacactttttttttttctttttgagatggagtcttgctctgttgcctgggctggagtgcagtggtgtgttctgggttcactgtaacctccgccttttgggttccagcgattctgctgcctcagcctgctgaatagctgggattacaggcacgcaccaccacaccaggctactttttgtatgtttagtagagatggggtttcgccatgttggccaggctggtcttgaactcctgacctcaggtgatccacccaccttgacctcccaaagtgctgtgattacaggcgtgagccactgcacccggccctgatatactattttgtttcataatttgcttgggtaatcattgattcatccattcaacaaatacgtatgaagaagctacagtgtacaaggctttgctttgggtgccaaggatactgcagggtcaggccagggtcacatctggctcaccaccagtcaggctttagggtttggtacaaattccacggcctcaggcaccatgggtgcataggatcagcaaaataagtccttaaagagatggaaaactcactcataaaaccatctgggcttgatgccttttgtagaggggatatatttgacaacaaattaaatatcttcaaaatccatttgtgcattcaggtttttcatttcttcttaagtctattttggtcattgatatctttctgaaaagttttctcatttgtctacattttcaaatctgttgttataaattatagctcataatactgagttacgttttaatagggaacatgtattttataaatacatgtttataaaaaatagggtcccactatgttgcccaggctggtctcgaactcctgggctcaagcaatcctcctgcctcagcctcccaaagtgctgggattagagatatgagccactgtgcctggccaggggacatgtatttgttttttttttttttaacaaaaagtacccagtgttaggccgggtgtggtggctcacacctgtaatcccagcactttgggaggccgtggtgggcagatcacttgaggtcaggagtctgagaccagtctggccaacatggtgaaaccccgtctctactaaaaatacaaaaaattagctgggtgtggtggcgggcacctgtaatcccagctacttgggaggctgaggcaggagaactgcttgaacccaggaggtggaggttgcagtgagccgagatcgcaccattgcactccagcccaggcaacaagaacgaaactccgtctcaaaaaaaaaaaaagaataaaaaaaaagacaaagaaaaaaagcaaaaagtgcccagtgttttattctcatagatcacaaagctcttagcaaaaattctgaagaaacactgagacctgggggatgggtgtgtgttgccgggagaggagtcgctattgcctcttgggtttctccgataacacctggcttttgtagaagatcttcacagtttttcaaagcacccatcccttgccttacctctcctgtctcccttgtctgcctgatgcctccaacttctcagaagtgccagggccagggcactgctgggcccatggtgtgggtctacattgcagtaaaaggctcgttacccactcccctcaacacaggagtctcctgtttttaggcagcttaagaaagcagtcttgtctgtggaggaatgcccagccttcttggtgcagatgctgggtttggggacccagctgtttgcaggagttgtctaggaacgtcagtacccagggactgtgagactcctgggatgttatagtccccatgctagcagagggaagacactgggcccatgagaagttgagtttaggtagccagtcctgctgggagaaaggaaagcctcagatgccagcaagcttgctgtccagccattttctgacaaccctgcttattgcaccatgtacagtaatcaacacagacttgcatctgctctgaggggtgcaggtggtgctccatggaacacacacatgcacgccttcacccaccctttcctgtacctttggaattcgtggcataggaacactatatctattgcacttgggtgtggttataatgccagggtaaagataagtttctctgtggagtacctgaatgacaagatcatattttgtgtcagttccacatggaagggctcttcctcacagacattggaagggtaacagtagaatctaagctctaggaaggcagggtttttttgttttttgttttgtttttgtctgcacatgatagacacttagcaaatatttgctggatgggtggacaaatggaaactggaatgaaatggagatgcctaggtgagtgtgggaaggactctgcctctcctggtctttgccctgtagatgccaaatatcctaggcgggaactgggaagttggcagatgctgctgtgtagagagtcagtggagcaaagactggaaaaacatccagcctgtgtcagctagcaaaagaggggttttgggtctattttggggtcagaatattagaggaggtaacctgtaccctcaggcttcagagtgtggttgactaggaggctccaaagagtaagtgaaacccaaggggacggagataggaccacttgatccatccttgtaggttcagagctatgtcttatcaaatgttttcccttcatgtagtagcatgataatgaactcttcctactttggtttgataatgcaatggattatatggatagattttctagtgttgaaccaatccttgcattattgaggtaaactttacttgatcataatgtactttttaataccttactagaattattttgctaatctgtttttgtatttagattcataaattaaactggcagatattccctctaattttcattttttgcactctctggttttggtatcaaagttaagttagcttcatgaaaataagttgtttttgtaaagtaggtattagctattccttaaagagctggcaaatttgttcataaaaccatctgggttgaatcccttctgtaggggaaatatgtttgaaactaatttaatttctttaaaagccattagtctatttgacttttctatttcttttgagtctattttagtaattgatattttccttgaatgttagccatttgtctacattttcaaatctgttggcataaatgacagttcataatactgagctgtgttttaataggggacatgtgattctttaaccaaaggtgcccagtgctttgtttctgtaggtcacaaagttcttaggaaaaattctaaagaaacattgagacctgggggatgggtgtgtgtgctgcagggaggggagtctggattgactcttgagtttctctgataatatctcgcatatgtgaaaaagccgtacagtttttcaacacacgtattgcttgccttatctcttttgtcttctcaaagtccttgaaatgtagattttataatcagtctcaatttgtagataaggaaaggccaatcagacataccagtttatctataatatagatgagatcagaagccactcctagatcacaccattttaattagaagagagtttagagatcatctcattgagaaactcttaacctgggatccatgtccctcaaagtgctcttgggtagacttcagtggctccataatttggatgagaacaaaattacattatttttcactaaactctaagtgcagtttagcattcccttctattatgattgcaagcaacaaacaccagagtagtagcagtactgtgtctccagtagcaatcacagatattttcatggcacattgtagccatcagagataactcaaaatactgtttacactcatcactacttcaaaattacactagttagtagacccgcctcttgatcttgacatgttgtttttaaaagtacatgttactctataccaaatttttaaaaatattttgataactgcagttcaaataattggcctcctttctaatcctttgcattcatttacttgtttattgtgataaaatatacataagataaaattgactattttaaccgtttatagtacatgtttgatggtattgagaaaatttacaatgttgtgtaaccatcaccactatttccagagcttttcatcatcccaaatagaaactctgtaaataatgaagcaataactcctcattcttcccttccccaccccccagtaacttctattctacttttttctctatgaatttgcctaaatacctcatacaaatgaaattctatcatatttatcctttggttgttagcttttttcatttagcttagtgttttcaaggttcatccatgttgtagcatgtatcagaacttcattctttttgtggttcaaaaatacgctacattttactccattcacctgtcaacggccacaggttgttttcacctttggactactgtgggtttttttgttttgttttgttttttgtttttttgagacagggtcttattcctatcacccaggctgcagagcagtggcgtgatccgggctcactgcaaccttgacttccctggctcaggtgatctttccacctcagcctcccaagtagttgggactacaggcacacaccatgcctggctaattttttgtattttaagtagagacagggtttcatcatgttgcccaggctggtcttgaactcctgggctcaagcaatccacctgccatggcctctcaaaatgctgggattataggtgtgaaccactgtgcctggccacctttgagctattgtgaataaggctgctatgaacattagcacacaagtatcttcttgagttcctgctttcaattcttttggatatatactaaggagtagaattgctgggaaatatggtaattctatgtttaactttctaggaactgctaaactgtgttcaacagtggctgcagcatgttacattcccaccagcagtacacgagggttccaatttctccacatcctcaccaatacttgttattttcattaaaaaatattaattaccatcctagtgggtgttgcattttattttaggcatgtaaaaactttattctgagaaggagtcatgggcttctccagactgccatgggggtccctgatacaaataaaggttaggaagctaggatgagggaactcaagagctcagagatattgtcacatgtccaaggtgaggtgatggactagcagcagcccaggcattagaactaagtttcctgggtctcaaaggagcccttttccctcctaccagatggtctgttctcatgtacatgatccaccccagccagtggtcagaactgagtcagagctggagctaagccattgaccaaccagctactgaagctgaggccagcaccagacacagactagatagacataattaatccctgtttgcaaatcactgcaatgtagaactaccatgcaccaccacagctgctaaatccttatccagcctacaaacatccactgaatgcctgtgtgcagatcaaactccatattcagttggagtgtttgggggacacttacggggacatcaacggacaatttggtttataggtataaagttcaggagggagaaataaccctgtgtatgtttcatttaattacagaataggtgtcttgatctctcgtttctttgtggggaccctctatttccgcagaggcaggttcagatggcctcttgagtctcatcgcccattttcttactgagctctgtcagccttggctcctgaacctttccacacttgtcagctcagtttttaaaataaccatagctgactttttttttttttttttttttgagacagagtcttgctctgtcgcccaggctggagtgcagtggtgcaatctcggctcactgcaacctccatctcctgggttcaagtgattctcttgcctcagcctcccaagtagctgggataataggagcctgccaccacacccaactaatttttgtatttttggtagagacggggtttcaccatgttggccaggctgatctcgatctcctgaccttaggtgatctgcctgcctcggccccttaaactgctgggattacagaagtgagccaccatgcccagtcatcatagctcacttttttttttttttttgagatggagtctcgctctttcctccaggctggagtgcagtggcgcaatcttggctcactgcaagctccacttcccaggttcatgccattctcctgcctcagcctcccaagtagctgggactacaggcgcccgccaccacagctggctaatttttttttttttttttgtatttttagtagagatggggtttcactgtgttagccaggatggcctcgatctcctgacctcgtgatccacccgcctcggcctcccaaagtgctgggattacaggcgtgagccatggtgcccagcccatagctgacttttaatgagttttaattctagctctccactgtgcaaccatgaataagtaacttaaccaccctgaagttcagttgtcttgtttgtaaaatgaggataataatgatacctccctcatagagtggttatgaggatggaataagacaatacacatagagggcttggcacagagcctggcacagaggaagcatttcattagcgctgttattgttgattttaaaatttattattaaaagtcactttgacgcctataatcccagcactttgggaggctgaggcaggtggataacctgaggcgaggagtttgagaccagcctgaccaatctggtgaaaccttgtctctactaaaaatacaaaaaattagctgggcgtggtggcagacgcctgtaaccccagctactcgggaggtgccttgtggtaaaagatgggccaaggagtttttggttttaaagcgaaagcctgtaatcactgtgcctgctcacagggggattgctatggctaagttcatagataattgggtagttggctgaggcaggagaatcgcttgaacccgggaggtggaggttgcagtgagccaagattgtgccgttgcattccagcctgggcaacaagagtgaaactctatctcaaaaaaaaaaaagtcactttgtaagttgcaaagtatgactctactatgagatctttacaactaggaattaagccagttacgatggcccatgcctataatcccagaactttgggaggctgaagtgggaggattgcttgagcccaggagttccagaccagcctgggcaacatggtgagagcccatctcaaagaaaacctaggaatcagagcttctcatctctgggcctaaaacatctggtggagtagcttctcaggaactgtatactgaatgaatgagtgagatgacatttactaacagttttattaacttttatcttttatttacctatttgaccatctactgtactgacttaaatataaaatagcagtttttctctttcaacctttttttttgaggcagagtctcactttgccacccagactggagtgtggtgatgcaatctcggctcactgcaacctccgcctcctggtttcaagtgattttcctgcctcagtctcccaagtagctgggactataggtgcgccaccgtgcctggctaattttgtgtttttagtagagacagggttttgccatgttggccaggccagtcttgaactcctgacctcaggtgatccaccggccttggcctcccaaagtgttgggattataggtgtaagccaccatgcctgcaccagcccctccccgcccccttttttttttgagacagggtctcactctgttgcccaggctggagggcagtgccctgatcttggcttacttcagcctctgcctcccatgctcaagtgatcctcccatctcagcctcccaagtagctggggccacaggtgtgcaccaccatgcccagataattttttgtatttcttgtggtagagatggggttgcccaggctggtctcaaactcctcaactcaagcgatccacctaccttggcctcccaaattgctgggattataggtgtgagacaccatgcccagcctctttcaactttaaatcaagtatcagtcttagaatcaattctctgtagaatttgtcatatgagtcagtctgctctctatttctatgagtttggcttttttaaattccacatataagtgaggtcatgcagtatttgtcattctgtgcctggtttctttcatttagcataccatggggccaaggacattttttcttttgttttctttttcttttctttttccctgctccagctcaaaggatggggctggggaatctttagatgagtcgggggaaggcctcagtgagaaggtgactcttcttcacatacctgaaggcagtgacaggatgaggcaccagaataatgttgcaggcagagagaacagcaggcaggagtatgcttgaattgttcagtacagcagggaggccagtgtggctcttgccgagtgagtgaggggcccacggtaggagatgagatcagagaagtaacaagggggcctttagtggggccattgaaacagcttaggattttctctgagagagatgggagccattggtaagggaattacatgatttcactttttttttttttttgagacggagtctcgctctgtcgccccggctggagtacagtggcgtgatcttggctcactgcaagctccgcctcccgggttcaggccattctcctgcctcagcctcctgagtagctgggactacaggtgcctgcaaccatgcctggctaattttttgtatttttagtagagacggggtttcaccgtgttagccaggacggtcttgatctcctgacctcgtgatccgctcacctcggcctcccaaagtgctgggattacaggcgacttttttttttttttgagatggggtcttgctctgttgcccaggctggagtgcagtggtgcaatctcagctcactgcaacctccgcctcccaggttcaagcgattttcccacctcagcctccccagtagctgggactacaggggcgtgccaccacacctggctaatttttgtattttttggtagagacggggttttgccatgttggctggtctcgaactcctgacctcaggtgatccacctgccttggcctcccaaagtgctgggattacaggtatgagccaccatgcctggccgatttggtttttaaagaatcacttcttctgctggattgggaatagtctgcagagaggcgaaggcaagcagtgcttaggaggctaatgccatcatccaggggagggatgatggtagggttgagtaatccctggagtgtaacaaacactaaggattattttattttgtggcaaatgtcctaaagctttcttgaacagtaccaggttgctgggaatgtatagagacagcttacagagcaccctacagttttagcaagggaactttcacgtaatataaaggcatgcaggttgtactcttgtatagttgtgtgtacattggttgtttcctgtagcaaaatcatgaagagtatgaattctagagttagagtccctacattcaaatcatggctccaccagttactaactgtgtgaccttgggcaaataaattaccctaacttctctgagccttcagttttccctctagtaaaatggggacagtgggttgctatgaggagtaatgagttagtgcgtgtacaacatttagcattatactgatatataaccatggctcaataacatagtagctatcattatggatatgaatataaccatttgtaaaggtcaaggaacatctctatttaacttagtttatttatttattttttattttttgagacgtagtctagctctcttgcccatgctggagtgcaagggagtgaccttggctcactgcaacctccacctcccgccttcaagcgtttctcctgcctcagcctccagagtagctggcattacaggcatgcgccaccaggcccagctaatttttttttgtattttcggtagagacggggtctcaccatattggccaggctgctctcgaactcctgacctccagtgatccgcccgcctcagcctccaaagtgctgggattacatgtgtgaactaattaacttagtttatttagagccatagcatatggggctgaaaaagaactaagacacttcatttagtctaaccctctcattttacaggggagaataaaaactagagatagaaaattccatagccaaaataaaataaaataaagttatggtccgggtgccgtggctcacacctgtaatcccagcactttgggaggccaaggcaggcggatcacgaggtcaagatatcgagaccatcctggccaacatggtgacgccccgtctctactaaaaatgcaaaaaatagctgggcatggtggcgtgtgcctgtagtcccagctactcgggaggctgaggaaggagaatctcttgaacttgggaggcagaggttgtagtgagccgagatcacaccactgtactccagcctggtgacagagtgagactctgtctcaaaaaaaaaataaaataaaaaataaagttatgcggccagtgtcacctagctggtagcagagtggggactggaacacaggtctctggactcccagtctggtgctttctctgctatgccacattgcttccatagaaccctcagtgcagcaccaggtgggaataataataacaacaataaaggcttatttgactcttactttgcgccaggcactattctaagtacacatatttgctcattttatcctcatgacaaccctatgaggcaggtacaattattgtccccatcttgcggaagaggaaactgaaggagagagggataaagccacttgcccagggtggagaatgagtgtggtgtgggagacatgggcaggaggctgctgccccgttacactgcacgacctgcttctccctttatgtaacagggaaattgaatccagtcgttcaagtcctttttcagccttcaaatttgcagaccctaaatgcttttctattatcgggtcttgaataaataccattccacttcattaaaactgctgtctttttaacttgtcttcatcttaatgatcatctacaagaaagactatttgcagaagagcctagaaaccaagtcaccaagcctgtgagagattcctgaaatgttatttctggcttccatagcaaccctaacatagggcgttaagcttaacggagtcagcgagagcagctggagccgggcattgaagcgctgagagcgctgaggaaacaaatcgttggctcaatagttttccttttgtgtaatatactgtcccagtgtgtttagggagttacgacttctgccaagtaagaatggaggaaatgaagcattgtatcaaagtgtacagagtttccaagcaaattggaggatgagtacaagtctgtgtctaggggagtctctgcagaagatgagggtgggcctgcagagacgtaggggtggggaggaggggcagctctgctttccccaaccttgggtgactaggccttcaggtcagctttgtgaagaggactgagcatgcctggttgccttttctgttccaccccgtttgccgacctcagtagagagtgggggtgatacgtgagtgaggcatcaaagaggccaagatgctgaggatgacagaggcagatatgctgaggctgacggagccaccagggccagtgcaggaaacagagctctctaggtatttcaggaagaaaaagatttaacacggggaattcggttatatagttgttggaagggctggaggagtgggagcccagggaccaccacgcaagagcacctcactgggatcaggatggtgctgccaccagaactgacgtctgtgcagctgctgagcagacaccagaacacgaagtctggctgccgcaactaactggctttctaaaaccttgcttgctggcagagccaccatccaccccacttcatcctttgtgaatatattgaattggggttccccaattcttacccagaaccctagctgcctgaaagatagtctgggaaatatttgttttgtccttttagcttctgcaacgctggaagactcatggggagagttgggagttcatgccaagtgccaatggacatggacagcaatcgattttttttttttttttttgagatggagtcttgctttgttgcctaggttggagtgcagtggcacgatcttggctcactgcagcctctgcctcccgggttcaagtgattctcttgcctcagcctcccaagtagctgggattacaggtgcacaccaccacacccagctaaattttgtatttttagtagagacggggtttcgccatgttggccaggctggtcttgaactcctgacctcaggtgatctgccttcctcggcctctcagagtgctaggattacaggtatatgccactgcaccctgccatttttttttttttttttgagatggagtctcactgtgtcgcccaggctggattgcagtggtacaatctcggctcactgcaacctctgcctcccgggttcaagcaattctcctgccttagtctaccaagtagctgggactacaggcacgtgccaccacgcccagctaatgtttgtattcttagtacagatggggttttgccatgttggccaggctggcctcgaactcctgacctcagccgatccgcccgccttggccttctaaagtgctgggattacaggcatgggccaccttgctcagcctgatatttatttcatttgaaatttggattaaataggtagaggagttgaacaccaaatagagatgagttgaaagggcccatcgttgacctaaactatttgctccaccatctgaaagtcctttgggattaagtccagggttagataacagaggggcagaaactcaactcccagagacaaaggagtggccttaacattctctctggtgccttctctattagtatatacataaggaaacattaatttacacccaagagtaggctgggagcttggatgggaggggaagcagggttgggggtcaggcctggagagattggctttgggctgggccatagatggagaagactgaagtctgggctgtcaggaacccttagaataagcctaaaataggaagggcacatctaaaacccttcagtgctcctcgtttgtcctaataaaatccagaccttttttttttttttttttttttttttggaacagggtcttgctctgtggcccaagctggagagcagtggcacaataatggcttactgcatcctcaccctccagggctcaagccatcctcctgcttcagcctcccatgtagcgaggactacaggcctgcaccattacacccggctacttttttttttttaatctattgtagagagggggtctcaaactcctgagctcaagtgatcctcttgcctcagcctcccaaagtgctgagattacatgtgtgagccactgtgccctgcctgaagtccagacttcttatgcaggaggcacatgccgtccacccacatggccctgtcttccccaacttgtcctttaggacccagccttgccacatcacctgtggttacctgggtgcgtgtgcatcccactctgttctggcctccagcttttgcatacgctgcccttttacctaaatgcacaccccagcttgttgcctggtcaacacctgctcaccttataataacatcatcctattataatactcatcaccttgtccagggatcttcccccaccccctatcttgggactggtgatctactccaggctctagtcactcgtccttttttgttgttgctttgttttttgtttttagagacagagtctctctctgttgcccaggataaagtgcagtggtgtaatcatagctcacggcaaccttgacctcttgggctcaagcgatcctcccgcctcagcctcccaagtaactgggactacaggcgcacgccatcatgcttggcttgtgaaaaaacttttttttttgtagtgatgtggtatcaccatgttgcccaggctggtctctaactgctgggctcaggcagtcctcctgccttagccacccaaagtgctgggactataggtgtgagccatcgtgcctggcctgctcatattttttatgaatcttaatgaatctgtcttctctacagggttgtaagctcctcccaggctgagactggttctcatactctatccctagcacccagcacaaagaggggattcctgcaatgtttgtacaactcaaccaaaccaaaatgatgatagaattgtctccgaagacaaactttgcctttgctggcacagggctgtggaaccttgtgccctgttatctaactggccccttcctccttgtgtacctacacctcctcccctcctccttccagggaaaggccctgaggcgctgtgttttggggcctccacctccttcctctcctctcttgcagcccagccctgtgttgctatttattcacaggtctctgctctgctctggctttcacttgctgaattctcagaaagcagatgaagcaatttattcagttaaagtgcccctgtgggtcaaatgccagcttgctttttaaaaccttcctatgctgctttttactttgcagagagcagaaattacctgttttgtttcctggtgctttctgcactctcttgtattgagggatggttgtgtgtctgtgtgtgtgtgtgtgtctgtgtgtgtattacaattttaacgtacatgtcatttctcaatttgagaaaggaagaaagatagtgagggggtttgatagagaatatcaaaattattttgtatgtattcagtcagctcattttttaaaagaaaatgttttaatatcactggctatggtttttattttattttattttattttattttattttattttttgagacagagtctcactcagttacccaggctggagtgtagtggcgcaatctcggctcactgcaacctccacctcctgggtttaagcaattctcatgcctcagcgtcccaagtagctggaattgcaggcacgcgctacaacacctggctaatttttgtatttttagtagagacggggtttcgccatgttggccaggctggtctcgaactcctggcctcacgtgatctgcccaccttggtctcccaaagtgctgagattacaggcatgagccactgtgcctgacctgactattgtttttaattttaactttaattttaagttcaggggtacatgtgcaggtttgttatgtaggtaaactcaggtgtcacaggggctggttgtacagattatttcatcatccaggtattaaatctattacccattagttatttttcctgatcctctccctcctcccaccctctgatgggccccagtgtgtgttgttcccctctatgtgtccgtgtgttcccatcatttagctcccacttataaaaaccactgtttcacagcttatttgtacttctctttatcaattaagaaaaagactgtttgtatagcaaactccgagagaggacgtgaggggtattttttggtgagacttgagcaaactgctttacgttgcaaggaaattcaattcattggaaactttttcctccaggactaaactggggcagctttcattttggctctctcacaaagaaaattgtccagggtctggaaaccacagttgttgaacctcatatgacgtctcttttctttcagctcatgcaacatttactagaggagactggtgtgatgtggcgtgtttttcctttccttttttttcctttccattttgctggctcgttggtgcacacttcctgagggcctgagagggctgtcttcctggaggaatttatgacagtcagcagggacaactgaaatttgagctggtgtgaacccataatccctcagggccctactggctggagtctctttagggagcatccttgctacccaaagatgcacacccattccccagcaccttcataaaacaacaacaaaatcttaccatggcattgccaagcatattttgcatacaaacttcccaggatggattctatctccatgggcagatggaatccatcccgaaagcatctttctctgccagcacactcacctgtctctgctctgcaaatgcccttcttggtagtagcttgttcaagggtacgcagagcaaatttggcaattctgaaatttcagcttttgtttgtgaacttcggctctgctcaggaagaacttgtcagaatgaaggttgacattcagcctgtatgtcgagcattcttgagagaagcacacggtgcctggcatcttgaatggcatcagctgcttgctacccagttctttgggacaagtgggtccatgagagaaaatatacagagcagggataagactgcacccgctctggcaggacagggagcctggctaccccaacttccttttcccaagccatctgctacttttcttcttctgcaaccaggcattcaaagcagggtgtatgtgggggaagaccctggaaatcacctccatctgggtgtacattgttacttttatcctcagtagttggtcaagaagtagagtgtattctctatatatctttattgggttcatccccacttattcagaagtagaatctctaggccgggcatggtggctcacacctgtaatcccagcactttgggagactgaagctggtggattgtctgagctcaggagtttgagaccagcctgggcaacatggcgaaaccctgtctctttcaaaaatacaaaaaattagtcgggtgtggtgggtgtgcctgtagtctcagctactctggaggctacgttgggaggatcacttgagcctgggaggcggaggttgtagtgagctgagactgcaccactgcactctagcctgggtgaggctttgtttgagacccagtctcaaaaaaaggaaaaagtttttagaaagttttagaaatactaatttttaaaaaagaagaatctctagcgaccgttcagtgtgatctggagttaggctgttctggttaaacgtagattgtgcctatcgaataataatttctcttaccctgcctagctctacagtcgcctctatacttgtctcaatgacccctgcactgtgagcttcttgaggccaggacctgacgatacagcactaaccattgtattttgcctgtggtgccttcagtacagtgccttctatgtgccggccctgagccaggcatcgatgaaagatgaataagtccaagtcatgacctcaaaggtggcttatagattgatgggacttgcaggccagtaaataccataagtatttgtggggcgacatcactgcacattaagttactcattgggcttactgtcatcacgacctggtgctgagaaggcacatttgaactccggtaggtgcagcagatgaatcactggggcctgagcgatgcctcccagggcactggcctgggcagagggtgaagtggggagatttgcacttaggcgactgtgtcttgagttgagctttatctcctgggtcacattccaggctcagctgccagtcaatgtgttatctggtgatggggagggtaacagggctcttcactcttggccacctactgggagcagtgggtaaaaatgcaggtatgagagtcagaccaacttggggtttaaatccctgttctgccaccactcattaatcccctgactgtgcacttgtcacttaacctccctgagcctcagcttcctcatctacaagtggagggtaacagtgcctatcttctttattttctgaacctaattgaatgccagatatatctgtcatgcatatgatctgacaatggaacagaatatttgcatcaggagacaaaagagactccaggctgtatgattgccatattttcaaggccactcctggtttgggggaagaagatggcaggacatcagaatggggtgccctgccactatcttcttttctagacccttggcagatggtctctcaggctcacataaccctagagacagagttctcaaatttgttgtgcttaagaatcacttgtagcaattacaaatgcagattcctgggccttaatcccagagattctgattccctgggtctagggtacagctggagtgcagtggtgcgaccacagctcgctgcagcctctgcctctcaagttcaagcgattctcctgcctcagcctcccgagtagctgggattacaggtgcccgccaccatgcctgctaatttttgtgtttttagtagaggcagggtttcactatgttggccaggctggtctcgaactcttgacctcaagtgatccacccacctcggcctcccaaagtgctgggattacaggcatgagccacggtgcccagccgtccccacctctttctgatgttatcgagctgtcgagtatcccagctgcaacctgttctttattgtgtctctgctgaccagcgttcccagcccattccagctcatggcagggtatctgcaatctttctcttccctgccctcccaaccccccacccacaagctttacctggaagctcatgtacacaccaaagggaataagcaaggacccagacaggcagccaggtgcctggcactaggccgggtactagggattcatagaagatactgcttgtggccaggtagctgcatgtgtgagatactggtggaagacactcagacagaggtaagcagggagtgttggggctcagaggaaggccactgaggccagtggagaatggcccattaaggaaaggttttcaaaataggtgaccacagggctgagtcttaagctgaacagggagcagagggcatgcctagcagagagggcgctgtgtagggactacagacaggcagtgtgacattgtataaggtatagggcagggagtggtggctggtggagaaggctgagttcatgagttcattctcccctgaacatcagcaaccttgccattagtgacccttgggatggtggcttttgaagaaattgctttgatggaatagctccccaagactcatggatactgggagtttatgtatgtatgtatgtatttatttatgagacagagttttgctctgttgcccaggctgtagtgtaggggcgtgatctcgactcactgcaacctctgctttccatgttcaagtgattctcctgcctcagcctcctgagtagctgggattagaggggcacgccaccatgcctggctaatttttgcatttttagtagagatggggttttgccatattggccaggctggtcttgaactcctgacctcagatgatctgcccacctcagcctcccaaagtgctgagattataggcgtgagccactgcacccagcccgatactaggagtttaaagctgtcatttctggttcttgggactcagatcaatgaaactcactaaaatattcattcatgggaaagttctggtagaaaggggaagattaaagtccatttttgtcaggagagtctctctctgggaaagccattgatgagatgactggggcataaggtggtgtggtggtgtgtgcctgtagtcccagctactctggaggctaacttgggaggatcacttgagcctgggaggcggagtgattgggagtaattggaaagtgacatctggaagacaaatcggtttattttcataagctccctccagtctatgggtgatgggaaattggggtgctgtgtcaagaggaatcctgtggttggactttgattctgagaccaggactgattaggggtgtcggtcacagatgccagggctggggacatgggggtgacatgcaaggcttggacttgccatcctggctccatattttatcatgggaccagctgtctcccttcctttggtttatgcagttgatttcgaaccctacgtgcagggcttgacatttttaccaattacacttcatcttactagtttctactcattattccatccctcagaaaccctttctgggcctgtctgtgttactcagcttattaacagttcctcccagcatcgtatgcagtggtgtagggagaaccataaatgcctccagaatttgcaaaaatgtttggaaaatgttaccaagtgggaaatgatttgctaatgagttcacaatatgtcttagacccattaagtaatccagggtgtctccctaatatagtagaagcaagttttcagaatattccccagcggttttttcagaaaatgtgaatagagcacgactgagtcaaagaaagccctagctcatcaactgcattctacagtgtcaggcctcatgtgatgccgcagctggcgactgactaataagggaattggagaggggaaaattgattatttcctggacaaggaccatggtgccttaatcaagtgccctaaatgcaggggactgcaggggaagtcgcactgtggtaaaaaaaaaacaaatatagtctaaattacatctgaagtagcctttcaattacccttaagcactgagagctggtcacagtctggaggcacacagggacagaagcacctgaggaggctcaggggccgcatctcaggtgtctgtggacatgcccctgagggagcacagtggtgggtgggatcccactgctgtgtcgcacggtcgtctttgctctcagtccatctgtctctctgtctctctttgacaagcccatgtagttcaagtctcataaataaaatgcgtacagccggggttcccaagccccatgctgtggaccgatctcagtccgtggcctgttaggaaccaggccgcacagcaggaaatgaatggcaggtgagcattaccacctgagctccacctcctgtgagatcagtggcgacattccgttctcacacaagcgcaaaccctattgtgaattgtgcatgcaagggatctaggttgcacactccttatgaaaatctaactaatgcctgatgatctgaggtgaaacagtccccctcttccccactctgtccctggaacatttgtcttccattaaaccagtgcctggtaccaaaaaggttggggactgctggcttatcggatgcaatttccttgtattctgatgtgctagttttatattcttatagtggaggatccataccgctttcacggttttatgagaaatatctcttacaatctttctatttgttttgctctgaccccatgcccacctggcagccctccgtcatgagtgcagttttacctggaagctcatgtgctgacccttcacatagccagccttgtctgcctgcccttatttctcactgaaaaagaatgttagcctttatagtcagacggtgtctcatatgattagctagtttacctttattcattttttcagacgtgggtaaaattgagtacttcaatctttgttgcagagcaccaggctctaagaccaggttggtagaaggattctatttcatgtgccagttctgacaaattgtttattggtactcaaagtgccatgttgaaaggatccaggctgagggggacagggccagaattgattaacaatgtctgccagggactgaaaaaaatggcattgttaagcttgccttagagcctgagacagtcaaccattccctctctcctctaccaaaaggtagtcaaccactccctcactgtccttctctctctcagcatgtatcattagagacctccttccagactggcttgatctgtttatatttatcaacaacagcacactgtatctttttggtctgcctgcttcattgtatcccgttattgtgtccttttcacagtcaggagtcttttccttcctctgtatccccaggccctggcatacaataggtatgttgaatgactggctcacaacctaagagttctacctaattgttctgcatgcagggaatctgccttattagggtcagtcgtttgccttgctgagatccatactacagagttccgtggatcctcttggtctgttccatctaggaataaaacgtacattttgcatgcccttttttttttctttcttaaactcctgctagctcattacgatcatggcttgctgtctctctctctctgttcttctctcatcataaaacagcttcaacttttctccccagtgtccctttgaaactgttggtgagctagttttttctctgtccctttaggaaattttaatcatgtttttaatcatgcttcatagtgttttgggtcacccttcggtaatttttaaaatcctctggttattcctagttctaagaacaattttagctcttggcttactgctactctgtccagcattacccttgtcataattgttggtgatttcaagatccacatgaatcatgaatcatcctttaatagctttgagattcttttctccaatattcttgtcttccaccagatctcagccactcacttctctctctctctctctctctgtctctctttttttttgagacggagccttgctttgttgcccagattggagtatagtggcacaatctcggctcactgctatgtctagcctcccaggttcaagcgattctcctgcctcagcctcccaagtagctgggataacaggcacctgccaccacggccggctaatatttgtatttttagtagagacggggtttcaccatattggccaggctgatctcaaactcctaacctcaggtgatccaaccgccttggcctcccaaagtgcggggattacaggcatgagctactgttcccagctagatttcagccaccttcttctcttatcttgaccctataattacagtaactttaatcctgccataatctcagtttaaacctcctatcttcccagcttacctgtactagtattccaactccaacaattctgtgaccttatctggacttccagttaattgatcctgctattttttcactgtctttcacctcaattcctctatttcctgcttccccagctttaattctatagggaatcactatagtcactgtcaactacctttgcccctttcctgattcatcgttctcgtttggccacatgataacccttgttaaattcaacttttaccagccttccccccatatctgtgtagctgaatgtggctgtagcaaaacatgcaaccacctggattggtctcatgtaaatttcataattgcagcctttaagtaggcctttaatgtggcctggaaatcatactctagttccctaatcccttcactcttccactgtcctagaaactgttacagttttttttcacttgtgttattacatttttcatggttctcttgttaagtgcccacaaaccatctgctcgtgggaactttgctgggaattgatatggaacatcacattttctgaaatcaattttcctgggtatttgactactgtccagactgtagtccttctattccccacagcccctcaaagatcggtgacctctctctttccgtcacacctgtcccgtccttcattctccccctggcccttgaccgtactgaactctccgtaagcgcttgtcgaggagtaagaatgggaaccatcagtggcttgacttactgggctgctgctatccaggcaggcaagcatctgttttcatcatattattaagtgtttttttttttttttcagcacttggcaggaggtaggcaagtttgggccatagctttcaggccctgagtccaggcaaggaaagaactgaccccagagagccaatccagccctggtgcatcttgagtattctggaaatggcagatctaaaaggacaaaatcatttcatattcatcatgagtatagcttggtggttaagagtgcagactacggagccatcacgatgggttcagatcccagctcctctacttcctagtgataaaagaaaaaactcaaccaaattaaatttaaaggagtttaactgagcaatgaacaatttgtgaatcgggcagcacccagaatcacagcagattcacagagactccagtacagccacgtggtggaagatttatagacaaaaaaagggaaatgatgtacagaaatcaaaagtgaggtacacagcgggtggattggctacaggctggcgtttgtcttatttgaacacagtttgaacactcagtagtgtatgaatggttgaagtacggccgctgggattggccaagactcagctattgttacaggtgcatactcctaagttaggttttcaatcttgtgtacttataagcttggttgcagtttttccacaaagactgaaatatagaagcatggagtcattctcaggccatatatacttcacttttatactagataggagaactcaagcaagttatctaacctctctagactcactgtcctcatctattaaagaacagtaacaacacctactttctaaggtgtgttctttcctactttctaaggtgtgtgtgaagaataaacaagccaacacctgtaaaccattcagaacaaggcctggcactaattaagtgctcagtaaatattagctataaattacgattattttctcttttgagtctcacaacagtattgtaaggtattattatccctattttgcagaggaagagactgagggtcacacaggttaaggagaggctcaagatcatttggacagaaagtggcagaggctgggcttgcatgggatcataggactctaatactgtttcacttaggatttcagagccccctttggtctccagatgaaatgattttacccttgtcatggagattcatattcattccttctccaaatgtgtcctaacttccccatgcagatggcaccaaatatttacagtatgattacactgccatgattgaatttagccagaacgggagagaggctgattagtgacaaggctgcaatcttgagaggaggaaatagttctgatgttgcacattgtcattctgctggagtaggaatgttgcttaaaattgtcctggctcagttccctttctctggaagagtaaaagacactcatttgcccaatacatggactttggagtcaagctgacagtactggaagagctgttaacagagtccagatcatcactttatggttagagggatgacgttttattatgggcccacaaactgtcctccaactgtggctgaaaaccctgtcatgagaggccagaaggaagatcattgtatgttcttctcccaggccaaggagacaggatgtccttcatcagaaccagttgtcagcataagaagaacacacaccaaggaaatccatttcctggaaacatctctcaacagttcccatgtggagaaactgtgaagcttttcacagcaaatgttttagagtgttcccaggtatttgcaaagctcctatcataatgctggctgtactgataatttcctaagggtgcctgccatgagacgatggaaagggcatcaggtctgaccatggtgagccatgagggccttgcagagatagagtcaactctctgggcctcagttttcctttctataaaatgagtgacttggactctgttgggacccctctgcctctaagattctactagtctgtgattccatgagtcaaacttcagaagtggttatggtccctcataaaatggcaaagatttgggtcctagaatctatgactccattagcaggaccacatctcctctagaacattttggcttcgtgcttgtcatcatctttttgtactaactgctctgattcaatctctttccctgaagacttgcttccaccagaattccatttaattccacagatgttgaatgaagactttctgtgtttccaactgcatgcctacaaagataaatgagactagtttcctaaccttggggaattcccagtgagatagcaaggtcaagactttatagaacttcttttctccagagagctctctatttctttgacctgtgtgtgtccctagaccagtaatattgacttcaccagggagcttgttagaaatggaaacctacagaatcagaagctctggggttgtggtgcactggtcttagttttgttctgttttgttttgtttttgtttttgtttttgttttcgtttttgagatggagttccactcttgttgcccaggctgcagtgcaatggcatgatcttggctcacagcaacctccagctcccaggttcaagcgattctcctgcctcagcctcctgaatagctgagattatgggcatgcaccaccacacccagctaattttgtattattattatttttttttttttagtagagatggggtttctccatgttggtcaggctggtcttgaactcccaacctcaggtgatctgcctgcctcggcctcccaaagtgctgggattacaggcatgagccactgtgcatttggcctggtcttagtttttaacaagtcctctagagagttgagatgcacacttgagtttgagaaccattgaactagccctttcagggacaagctatgagactgtggttctgagccctcaagggacccaaggacacattttgaagaaaattcagttacttgggctgccaggacttggtgttttcaactcagaattacagctttcttggaacctccaacaacattttgaacctttgtggcgtttttgtacatgtgcaggtgttgtggaaactacccatttgttttgaagggaaagaatccagtttagcacacaattctccatggaacttccaggcttccctttaaattgattgtgatgcttggatagatattgacaccatgactaagacccataataaaggcccaatccaaggaggctctgctacttccaaagatctccaaaggaagagagttctcagagtgcgagtcttgtgtgaatttccctcccttcaaaggtgccttaattaatatcctcctccatggcagggtctaagcctggcccctcttctcagcaggtaaagattattgggtcacactctccctgcagtaagttcagacatgaagggtcgggcaggtgtggctcttggagagggcctgcctgggtcttgggaatgctcccccttgtcctccttcctgggatctgcagatccatcatctactgccccaacccagggctatatgctaaaccacaggagccttcatgaaaattagaaaagcactcctgccttttttttttttttttttttttttctgaggtggagtcttgcactgtcacctgggctggagtgcagtggcgccatctcagctcactgcaacctccgcctcctgggttcaagtgattctcccgcctcagcctcccaagtagctgggactacaggtgcgtgccaccatgcctgactaattttttgtatttttagtagatttggcgcttcaccatgttagccaagatggtctcaatctcctgaccttgtgatcctcccgcctcggcctcccaaagtgctgggattacaggcgtgagccactgcacctggctgaaaagcaccccccttaaggtgcctcttagggtggctcagcccctggggctcagggcttggctggatttcagttcctctcacctccttgagcaggtgcctgtgtgcagcaccaaccacatagccatagctgtaaccctgcccctacccagcctggggctggacacgagtgagggctgatggaggggtggggagagcctgtacatgcagccagcacacgtcgggagttcccaagtgctggatccttcattacatcatttccttaaattcttacagctgcccaacgaggtggatattggttgcacctctgtatatttttttctttttctaaattatgaaagatttcaaactctcagtgctcccatgttctcatctatgcaatgggtatgatgcttcttgatcctttctcaaaaacttgttctgaaaatcaaatcacaccaagtgacaaagtgctctggaaatgttaggtttcatatagatcttatcgctgaaccctcaaaggctcactttctggggcctctgttttgagacactcaccctggactcacccagccctcagcgttatgcatgggtatgtcagaacgttggtttcttgccaggctactggtatttgtgggtgcctcctcccctaaaatcattagacttgtgaggcggcaaggatgagttgtgtgtgcaggcactcagggacgagtcacagcctggcaagctggcctggacaggatgacttcacgggcctttcccacttctcatttttatgactagctttactgtttcattttggctttctctctctttcttgcagctgtggtgattaggatttagggcaagcatttgggatcccttttctaatccctttcaaatcctgattcagctgcaaagtccgggaagggagtagagaatgggggaggagggactcaccctggtgaaaggcagtagctcagaatatccgagaaactcccaacaggaatgcccagcctccacccactaaagctggaggcctctcatctcatccaatatcaccctcgtactagaaacgcaaaagggatgagtttgtctatggactcaaacctttacagtcttcttgcttagcagcttaaggcataattatggtagtcatggtggtaagggacttaacatttgcctttttccaatttaactgtgtcctttgttgaaatatttcttagtcaggtccccttttctctatttccactactgtcctaggattagatctgagtccccctctcaatgagattagtccagaaattatgtataccatccatcttgcaaaccactgccagactctgttgacttttcattatgtaacttccctatgggagaggtgagttacataatatgatgctaagatgcccctcactggtggcatcatgtacatatttctcagtctgaaaggaaaggtctttttaaactggcttcaggccatctgtccaactaattcctgcctgcaactcctagtataccctctactacaaggtctcatcacttattctgttacccaccacattcattccgtcttgggctttggttcatgtgatccactccatgtgctccttctctctaatccaaacaccatgcatctataaggtcagctcacgtcccatctccttgaccccagcccattcatatccctattctcttagcagctattgtcaggatgacacagttttcatgccagttattctttcatggttttattagttaattctccccaggtagattagaagctccttaactttggaccctgtcctaagcttctgttatattctctgcagtgcccagccaagcttatgtgtcatgcagtaaagaataaaataattttgaccctgatcaggtgtttggttacataaaaactgcattggcaactttctagaaactaatatattcatttatcttgcaaaaaggattgctatctgattatagccagtagtcatgatcttccagccatgcacaaatatacccttataactttcatgagtggggaggaaaattgatgaaggaggtttcaaaggtgatcatcagtcccaggatttccaacaatagccagtctgccctgggtccttaactctcttttaatgtttttattcttatttttatttttttaatgcagtctcactcttgttgcccaggctggagttcaatggcactctcttggctcactgcaacctgtgcttgctggattcaagtgattctcctacctcagcctctcgagtagctgggaatacaggtgccgccaccacacccggctaatttttgtatttttagtagagacagggttttacagtgttgaccaggctggtcttgaattcctgacctcaggtgatccacccgccttccaaagtgctgggattacaggtgtgagccaccacacctggcctctcttctaatgtatttgacctctcctctttccccagagagttcctgtgagaacaagcgggcagacctggttttcatcattgacagctctcgcagtgtcaacacccatgactatgcaaaggtcaaggagttcatcgtggacatcttgcaattcttggacattggtcctgatgtcacccgagtgggcctgctccaatatggcagcactgtcaagaatgagttctccctcaagaccttcaagaggaagtccgaggtggagcgtgctgtcaagaggatgcggcatctgtccacgggcaccatgaccgggctggccatccagtatgccctgaacatcgcattctcagaagcagagggggcccggcccctgagggagaatgtgccacgggtcataatgatcgtgacagatgggagacctcaggactccgtggccgaggtggctgctaaggcacgggacacgggcatcctaatctttgccattggtgtgggccaggtagacttcaacaccttgaagtccattgggagtgagccccatgaggaccatgtcttccttgtggccaatttcagccagattgagacgctgacctccgtgttccagaagaagttgtgcagtaagtcctgctcctttgtcactcttctagaggaaccactagaattcattcattcatcttcaagtgttcattctgtgttactatgtcccaggtactgtgctggcaataggttttcaacaaaggccaagataaacacaacgtgctccaggggcttacactttggccaagagacacatgtttttatttatttatcttttagagacagggtcatgctctgtcacccaggctgtagtgcagtggcatgatcacagctcactgtaacctcaaactcctgggcttaggtgatcctcttgccttagcctcatgagtagctgggactacaggtgtgcaccaccatgcctggcttattttttaactatttgtagagacaacgtttcgccatgttgcccaggctgatctgaaactcctggcttcaagcgatcctcctgcctcaacctcccaaagtgctgggattataggcatgagcacccagctaagacagacattaaatatataattatacaaataagtaactatagttgtcacagtgtaatggaggaagaattcaggacatgaaggagtgtgcaaccccaggaccttatctaggcctggatgctcagggagattgccctggggaagggacacgtaagcccaaaccacagaatgaggaagagtagatagacagagtttttcttcagcacatggagctgccctggaattccctaagttggaattcatgagttggagtacggataggaatggaagggcagaaaaagtaacataatctctccttggatggtgtggaataccaaggcatttttgccccatggtggtgctggcaggggatgttttctcagctgacaaagaggtccagcgtatacagaggaccaaggtgtggtcctggcagctccccacctgttaagattgtaggggccactcctcacctgccaactctttctgcaggaagatgcctctcggagcccctgagctgcattcttctatgttggaagctttctttcctcttttgctttctaaccctcttttcacagggcttctctctcccttccttcccacgcactttccagttatctctacccctgctgctgcccccactcttctcagcaggtcagcctgcattctccccagtttcctgcctctgcggctgcctttttgttccttcctcctccgggagggcagggggccagccgcccaatccaggaaactcgcatcctgatttggtaaacaatgtcccaccctgacttgtccattcccagtggtccctgtcccctccagctaccatgaatctttggtggggaaataaagggaaataatctatttttaaatatctatttgtaaattatctatatgtaaatatctatttgtaaaatgtaaaatatcttcctagagcagagtggagaatgagctttagagccagactcagcaccaactccccaggagagggcacccaggagggggttctcagaatgtgacatattctagacctctaagatatagcccccagcgaagaacaatgtgcttttgatgtgtattaaacaaaatcccctgctgagaactaacttcaaaaagcacagagatctcatttgttcttgactccagaatcaaaagatttacttaagaaatcaatgccatgaagaaaaaaagaacctttttccttgccatgccacttggaaagtgttcagaagtgccatttccctggcactgcagaggctgtgttgttgtggtgtgttgtggcctaagtcagctggaacacttcaatcagcagaacacactgcaaacattttcaaggtttatgactttaaatgacttctgcagaatttatgtttcccctttcctgaaaatattaaaagggaaattggttctgtaaccattttgacagcttattcatttgtgttggaaaattttaatggaggggttctttttataagccttctgtatttatcagaaaatggaaagataacatgataaggctgaggagctacacaatgggactgaccgcccccctccccccacccccgcaatcctggtgtcgaataggatataccaatgtggacttgtctgtggaaaaaccatctctgtgtgctttctggcaaggcagcaaaatgaaaaggcagtttggacttttcctcccttcatcttctttgttataatctggaagctctaagaaaacattagcgttatcccgcttgttcctgtgcctgagaaatgaatcccctgtgagtccccccatccactctgcaggagacagggctgctgtctctcactgcactgcactgcccggctttgctcagcagactcagcagccgtcttgaaaggctgaagaggccccagggcctctttatcaacttcatggtaaagactgtagtaactaacatttataaagcactttcccttatgttatcgcagaaagccccaggaggcaggcagcacactcttgccactctctttttacaggttaaggaacttgctaagtgaatcacctgaaaaacaaatagccaagagatagttggatgctaattccaaacctcttgctcatttcactcctctgcatgttgggaattacaaattcctcttttaaggtaaaccattttctggtggccacctccacagtccagcctggccaggtaaacctactttgcaattggcattcacctaaaataggtgaaactctgaaggcagccttcgtaggaggaagaggagctgactctagttgtacaatcttgagcaaatcctttgtgctctctgagcctcagttgcctcatctgtaaaatggggattttatatgcagaaagtagatgagtgaacaggtgttgtaaatggtagagccctattcagtgtgcactgtgttatgtattattacaatcaaatacactgaggaccgatgggctaggcagatggcctcagttttgatctgcactcaaatgatcagacaaaaatggtgagcattttccaagttgcagatgacatctctgaggtttgggaagtctcatttgttccttaaacattcattgaacctgtaaaccaaaaagtatctgagacaagtcccaatcaatgtaaaagtttattttgccaaggttaaggacatgcctggagaaaaggaacacaaaatcacaggaacaatctgtggtctgtgcctttttccaaagatgattttgagagcttcagtatttaaaagggagagagggagggcatggtcacattactgaatccacatgttgcaagagaaaaggagcaggtaggggaacagtcaattatgtattcctctagtgctcagtaaatcaacactttacataagataaggtgaacatagagtagctacttatgcagatatttaaccttttatctgtagctatctgcttaggaacaaaagcaaaggcagtttcttgcattactcagcttttagcttaatttttttccttttggcatagtgatttgggatcctgagattttattttcctttcacaaactgtaccccaataatagctaatcttgtcctgtgctaggtactttcaaatacagtattccacttaatacttaaaatagccgtttgagataggtactatcattatcttttttttttctttctaagagataaggtctcactatgttgtccaggctggcctcgaactcctgggctcaagcaaccctctcacatcagcctcccaagtagctgggactacatgtcactatacctggctctattatccctattttacacaactggaaattgtcagggtctgcctgggggctccaggagagctttaaagatgaggtgatactaataatcactaacatttcttgatattaatgtatgcatgtgttgtttcaggctattagtgtatgttaactcactttattcacacaacaaacctgtcaagtagatgctcttatagttcccattttatggaagaggaaattgagaaccaaagaggttaaataacttgtccaaggtcacaaacctgtaagtgctggagcttgtttttttgtttttatttgtttgttttattttgttttttgagatagggtctcactctgtcacccaggctagagtgcagtggcatgatcatagctcactaccgcctcaaagttccatctcagcttggactacaggtgtgcgccgccatgactgaataatttttactttttaaaaaagaaacaatgtcttactatgttgcctaggctggtcttgaactcctgggctcaagcagctctcctgcctctgcctcccaaagtgctgggactacagacatgagccactgtgcctggcctgtaagtggtagagttgagacgtgagcctaggcattctgcaggcagaactgaaaatcaatgctacatctgcagattgggacaggttctgtctgggtgtgatcaaggcaggacctttatcatacagtgaggaattgattagactctgcagccagacctcgctgggtgagagtcctggcttttttctctttggctgtctggctgtacaatcttgagcacagtggaggctttatacttgcaggcagggacttcccataccagccacagcaaggggaatcctgaggttgcattctcaggccacccttgagaccaccagggagaggccaggtgccctgtgaattgaggtcctgtctacaagatgaccaaaccccacacatcctggagtctgccatttttgccacccagtaagagaaaacatggaatctatgggctgaaaacgctgtccccagtgttctggtgattcttgccacctgggcgagattgcttttaattaacctctaggtgctgactttatcagcctcatctggtattttggagcagggagccaggctgttcctaccctaatagccccaccccacccaggccaggcacaatttaaggccctaatagtattcctaggacacacccttcatgaactggcctgggcagtctacactgatggcacccctttgaggtcctgatgtgaagtggggaggctggactgacttcacaaacgttgagtctactgtgcccagtaatacaagacctccagcccacctccctacactgaccactcctttagtcattcatacaatcattaaaaaaaggactgttcttatttcctagtcaacaaatccaatcccaccaatgacttaggctgctgattagttattcctccccgctgaacacaaggccttggctgagtgtaaacccagagggccttctgagaaatgaggctcataggactgtttccagcaggccggtggaggaggcaaggctgtggtctccccttggctctcaccgcaaaggcccatcccacagagggcaaggcatgaggcctggatgctctgaaagtcactcagcactcacccacagcattctacagatgggaaagttttattctagtttagtgaaggtgtttgagattcttttggttgaaagtgtcaggaattccatttttttctaaaaggaggggggagtgcattatattatctatggaaataaggatggcagttgtgagagtcctgctttcactgcatctcccctccactcctctccttctccagtccacagtcaggaagcatggccccaccagcccctgaggctcacttgttctcagtttgagcctccttttattcagttctggttcctaaatgccagtaaaggactctgattgtcaaaccctgtaccaaccaacagtggccaggagtgagactacctcagaccaccacggcagctccccgatgcaaggtgtctggagtgagaaggaagggcagtttctagaaaaaccaggtaccagattaaataataggtgtctgtactgaggtccctagaggctgtccatgcctttactctacaggtaaagaaatagcctacaagagctacctgatttcccagaacttccctcacttgttcgaggtagaggggaactagagcacagtcttctagctcccaatccagtgccttttccattacaccaagttataatcttttttagttccagtttctcttatggcacatggccaaaataagccttagtaacaagctgtcattctgaaacccaatgcaatagttcttttaattccccctccccactaacttttttttttttttttttttttttgagatggagtcactctctgtcacccaggctggagtgcagtggcacgacctcagctcactgcaacctctgcctcccggtttcaagcaattctcctgcctcagcctcccaagtagctgagcccaccaccatgcctagcttatctttatgtttttagtagagatgggattttgccatgttggccaggctggtttcaaactcctggactcaagtgatctgctcacctcagcctcccaaagtgctggtattacaggcatgagccaccatgcctggcctaatttccgcaattgataggtgaagaaagtggagttcagagaaaccaagtcatttgcacaaggtcatagggagtggcgaagctgagccttcaggtggtctatttccggtagccatcctctccccacgatgctgcctgctgcccgccagatattttctctgcctcacatctcctgtcttcttattttgtctgttagggtctcaccaagaagacaggcaccaggtacatcacttgggcctcccactcatgacagtgggtgactgccgtgtagttggttgcctacacactacacttccttaattatggagagagacagtgacatgctgtgagtgccttagaaatgtcctctgcccgtgggtaatttgactccagcagtccaggaaaagaagagagtctttcaggatgcaaagcaaatgcaaattaaaagtgggataatgattacccctcaccatacgattgtcaaaacttgaagtttgataacaccaagtactgaagttttgaggggatgggaatcgttaggaccatcgttgctgacatgagctgtcttggaaggcaatcaggccatatctgtttaaagtgagacccagtcctagagaaaacatcgtacatgaattcaaggggacgtgttcaggaatgttcatcacaacactgtgaaagtgaaaacttggaaaccacccaaatgcttaccaatggggaaatggccaaataaaatgaggaaagtcatatgaccaatggataaaacaattgggagggataaactagatctaaggttttgattaaatctttaaatctaaaatacagctagttttcattattcacaataattatgttttataaagtcactgcaaacactgagttagagaatactaaaccattgctccatatattcctgatggaatatagggttaggttcctgcaatcctctggtgacaatattttttgtcaactaatcaatacatagccttgttttatgtgtgtttctgtttaaaaacatcttattttttgtttgtttgtttattttttgagacagagtctcgctgtgtctgcagtggcacaatctcagctcactgcaacctctgcctcccggtttcaagcaattctcccgcctcagcctcccgagtagctgggattacaggcacctgccaccattcctgactactttttgtattttttttttttagtagagacagggtttcaccatgttggccaggctggtcttaaactcctgacctcaactgatccacccaccttggcctcccaaagtgctgagattacaggtgtgagccaccatgcctggccgaaaacatcgtatttgatatataccattgattcattaacatcagacccacagccaacggtaactcctgactgaatgaaacttacctaacacatgttttccctgtaaggcacatcgcagcctttctgcactgaggaacactagacggcgcatcaccattttaaaccgcaaaatcacttacagaaagcacagaaatgaaaaaacaaacaaacaaacaaaaaaaccacggtgctaagtagactgtgaaaaggatgcttgttcacagaatgaaagctgaaaaagaaggcagagtggctccttgttcaacctcagctgagaacatctgcaccaggcaacacatttttttgtagtctcagctacttgggaggctgaggctgaggcaggaggatcactggagccccggagattgaggctgcagcaagctgtgactgtgccactgtactccagcctaggtgacagagcaagagcctgtctcacaaaataaactaaatttagagatattttaaattgagtgctcatgcactctgagcatgtccactagtgaccgtgaaaacgctgtgagtattggtttgggcttacaaatacattttagtgagtaggcaaattcacaaatatggaatctgtgaagaatgaggatcaactgaacatgtcttcacagtttgatatctctgaaactggggtgcattttagattccatgaaatacagtacatgtatcaacattgatagaatctgtgattaacgttgagtgaaaactgaggtgaaggtcaatgtatataggatgaacctacagatgtaaaataagacaaaatgccaccataattctcctttgctataaaatggttagcaggtatcttcagcattccccaggcactattctcaacactctaccatctccattaatttaacctttttgaggttcttatgaggtaggtgctatttttattctcatgtcttataaagaagttaagaaaattgcacaaagggctgggtgtggtggctcatgtctgtgatcctaacactttgggaggctgatgtaggagaatcgcttcagctcaggagtttgagaccagcctgggcaacatagtaagacatcatctctatttttaaaaatgagaaaacttctattttatttaaaaataatgataacaataaaagaaacttgtacaaggtcacaaaaaaagctgtttgtttcaccctgaagtaaaaatgactgattggatctacaaactttcctagtgatatttgtatcctaacaggaaccaaaacacagacaatcaaactcagaacagtacattctaaattgtattgttgtgaaatgaaacagctttacttccctagttcatttattgcccaccatatttcttactccaatgtaaagagacataaacttcagatggatttaatcacagctgagttttcacaagtgctggattaatggaattgttctaagcttttgagagctccttttattttagcttcataaaaatatatttctacatatagacatcttttttgtttatgagaacacttgcataacttgttatgtttgtactgttgcttgttaattttaaatacaatcaagttacattgagtaaagtcataaattaggacattaaaaaaagagaatttttatgagctacagacagacttatgcaggaaccaatgtaccagaaagctgaggtacttcaagaactaaatgcagagggcaggcgtggtggcttatgcctgtaatcccagcactttgggaggccaaactgggaggattgcttgagcccaggagtttgagaccagcctgggcaacatagtgaaaccctgtctctacaaaaaaaattttaaaaattagccgggcatggtggcacacgcccatagtcccagctactcaggaagctgaggtgggaggatggctttagcccaggagtttgaggctgcagtgagccatgattgtgccactgctctccagcctggaagacagagcaagaccttgtctcaaaaaaaaaaaaaaaaaaaaagaaagaaagaaaagatgctaaataggtatcttaaattgagacataaagattacagaaacatgaaacgtgtgagtgcattttttactccaaaattgtgtgtatacttttgcatattaaaaatttacgttactcttgaaacatgattttgagaaactgttggttctttaacacattcttgcttatttaatagcttttcctccagccccattgctgcttcctaaaaatccacacttaagtcaaagtcccctctgatgctggcaaacttttctgattccccagcccaccacatgggtattattaagttgaattggaaatttcttgcttttttttgtagatcaaaaccaatcaagtatcagcaatttcatatagttcagcctaacactgtttctctttgattttccatggccctttatctggccctgtcttgtccaccttggactgtgagcccccttgagggtagggactgcagcttatttctctgagtcctgcccagaggagagagtaggcactgaataaatgcttgctggctggaatggagtgagaaagggcatcactgttgacttaccttcctgtgtcttccctttcagcggcccacatgtgcagcaccctggagcataactgtgcccacttctgcatcaacatccctggctcatacgtctgcaggtgcaaacaaggctacattctcaactcggatcagacgacttgcagaagtaagattgctttgctgatgtatttgtggtttcttcctattccctcatcctctcccttcttttatctgggctcattttattcatctgtgatgcctcacccaccccagttatcatcccttggggacagaaataaagtttggtattttctgttgaccccatcacagtgcctagtccagagctgggcacatagtaggccatcaggaagagttggagagataggtagaagcaccatctcagaaatagcctctttggatgtgtgaactggtctcctttacttccaagcttgttctttagcagggactactgaagagccttttcatccactgtctttattaactgtaccctaaggaactgtttccatattttattatcttctataaagtgtggatttaggaagagttgttaacctcggctgggagtgattattcaagttctgttttagaggggtgcagggacccagttgctttggtgtgggacactttataggtgtcctagattttaaaaagggggtaaacagatgtaagatattagaactcgcattctcttttttggctaagtgccaaagactagacagtatactgatatttgagccagcacgaggtagtctaccccttaaaggacagaattactcatacactgagtaccgtgtccttactttttaaagttatggataaagccactgagttaacctacagatgaccaggctaccaaaaacaagtcatgaggaagaccagcccacatggaagcaaataaaactcagctaatctgacacttagttcgtgcagtgcataactgttgccatgtgtaattgttgcagtgtgtcattgttgcaatgtataattgttgttatacctcatggcaagcaattaagcattaatggaaagcagtttgcacaaatggctgtaattagtgtcacatttatagaggccaaccacctttttcatgtttcttctcactgtttttcagttttggggttgagtggttggctggagttctccctgcccctcaagattaggtaacatctacttgaccctccgcttctgtgtggcctgtggaaacccaaagccctctggactctgaatcgcaggggtggggtgggcggtatgtgttcttaggctcctctaagaccccaggatcccaagttgagtgcagcctgaatcatcctcatcttccagttgaagatctgacgcttcctcaaaatccataacaaaaactcactcccaccgaatactcatgggtttcatagagtttcctaaagaactgggggagcctgggaaaggtcatctcacacactgctcagcaaacaacctagagatctctttagacacccccctctagacacctccacctcttcaggtgttctacctccccacaaccatcctctggaggcacccttcctcctcttcaggcatcctcccctctgcccggatgcttctctgtcccatctcagcttcccaccatcttgcccactcccttcctgccctttctccttctccttctctgtctccttctccttctccttctccttctccttctcctcctcctccacctcctcctcctcctccttcttcttcttttcctttgtttttttaagacagggtcttgctctgtcgtccaggctgtagtgcagtggcacaattatggctcactgtaccctcaaccttccgggttcaagcagtcctcccacctcagcctcctgagtatcagggaccacagctgcatgccaccatgcctggctaatttttgtagagatgaggttgctcaggctgctctcgaactcctgagctcaagtgctccatctgcctcaacccccaaagtgctgagatttacaggattgagccgctgtgcctggtgcccttctcttcttaggagcacaaggaattcctctccttgtctcatgtcccactgagtgactgggatctgggaatctgctgatatttattttccgtgggctggcctagccaagccagaggaattctgacaccagcaaataaaaaataaagtgttctttccctaattttatgagcaaggccttcccccacacagcagagtttgccagacccctgcctggtcctgccacaggccctgatgtcccccagatctcaagtactgctctggccttggattcctcctgcctagggatgtgccacaggagaatatgaagcagaccctgcctggacttcagacagactgaccagggggaggggcagggaggtccaggcggaggagggctaggagctcagggcaggctttctcaaacttcagtgactaagaatgagccaggaaactgacttctgggctcacccgcagagatgcagagtcaacaggtctggattttcaatgaaccgacgaatgactgccacactttgagattcactggcctcaggcagtgaggggtcccagggaagggcttagcagagctctgctgtcccgtctgacccagctctccagtcaccctgaagcagttaaaccatcttaaccttcagccagacttagcttaataaatgtgcagtgataaagaacagctctctctctttcagaaggggataatactaataactcttttgctttcccaaaattggtgtaccaggggccttggtggaagaacaaggccttcactgtctgcagatctgggcttgaacccgaccttatcacttaccaactatggctgtctcactctgagctggttatttaaacttcttgactctcagtttcctcgcccataagaggggacgggtggtaacaaatcaatacctgtctcactgattatgtccttgttaggccctgtttttggtctaggggacagttaaaagctgtgccaagtgaaggctgtgccatctactgacccctgctgatgagcagggacctgtgcctgccaacactgagagaaactcacagtgggcctggagaggaggcatgtactccacttctggaagctgtttccacttaatttccatgtcctgggcgtagctggataatctcccagatgaaaagccatgtgggtgacacctcctccccaaagcacctcttactctctaagaagtgcttgccattcattcttccatacaatcattgattggttcatttattttttcatttaacaattgtttttgagcataaaaatgtgccaggcagcatgcaaagtactggaaataaaatagtgaataacacagcaatattctttcttttttggagctcacatttttgcatgggagtgaatcaaataaacaaccagggtaattgcaaccaaaagtgactgcaatccacgtccacctcagtgtgcaacacatgaggtcaagcctaactatagccacttgttaggtgtttaccatgtgccaggagctttcctgagtgttttatatctgctgtctcatttaattctcacaatgagctcttaaagtgggttttatcactctcattttacagataagcaaaataaggaacaaaaagtttagacgatttacccaagctcacatggctagcaatgtgatcaaaccagaatccaaatcctgttatgtcctcgctcttggccatcatttgagactgtcccatgaccctagaggaccccgacatggcagcaggacaacccttcaatcagaaaaccttctccaagccgggaagacagataggttcctcagcccactaatccaggggagacttagaactaattcaggactaacattcaacagattgttacttccccaagtccactgctaattgctgtggtactgtcatcacacaaaataatagtgggagggcctcttcagcaactgccttcaaatacacacacacatacacactatagaaaaaaaaaaaaatatatatatatatatatataatctccccaccattgtatatttgtaatttgtgtggagagggaaagcagacacagttgatccacacattctttgaatggtgatggaccttggctattagacttctggcttcctctcttatggaacttcagaattctgtcccctcccagtgtcccagaggggtgatggttcttacagaatcaggttattacaaaacacctgaatcccatattcagacagcttggatcagcggttgagctgaaatcctacttgtctataatttccacttttatcctatttctgctatctgaagccatataccaaaaagttatttccttatccaaataaatagagaaagcccttcaattattatacagtgttattcccacacactgaccccattcctatcaattttctcttcttcaggggagaaacacatcttttgatgacctagttttgggtctcttcactgtccaggtaaccctcttctgggtggatattagttgtctaaaaagggcctttccattcgaagactagatcaaatgcattaaagaattttagcttccatcacttcttggccttttggctaagatcaaggtgtagaattttatcttccaagttgtgtctatatgggcaattttgaacatactggacctcaacattgtggattccttctgcctttcaaaaagtcttccctgtcaaataccattatatgagatatatgcaagagcatcagcataatactagaacaatggaattttatgttccttccttttcccatttaaaaaaaatggggggaaagaaaacctcatgaagtgtgcccgtcttcacatgctatttccccttatccttccccttcccagaattcctgtcctactaagaaagaactttatcttgtttctttttcttgatatattttcaaaataaggaattttccctttcttctggaacatttaatctatctggaagctgatgataatgcagcatttagaaaactccatttggcagaaaatgtagactttcttatccagcttaaattttttttcttctctcaagaacgataccaaatgcattttactgctttcattctttggaaatgttcccaacattatttttcccaagctacataagtgatttaatagatttatgttagagtttaaacaaggagcatgacccagaaaaaccactgaattattagagagagataactataaccaacattctttgtgaatttagatgtgaaaattcttaaaaatttagcaaatagaattcaacaatatatagaaagaacaatacatcaagaccaaatggagtttattccaagaatgcaagtttggtttaacattcaaaaatcaatcaatataattaatcatagtggcgaggtgtggtggctcatgcctgcaatcctagcactttgggagactgagttgggcgtatcacctgaggtcaggagtttgagaccaacctagctaacatggcaaaaccctgtctctactaaaaatacaaaaattaccctggtgtggtggtgcatgcctgtaatcccaattactcaggaggctgaggcaggagaatcacttgaacctgggaggtgtaggttgtgagccaagattgcaccactgcactccagcaacagagcgagactccgtctcaaaacaacaacaacaacaaaaagccactaaaactaataaatgagtttagcaatgttgcaagataaaaagtcaatatacttaaaaaattacttcattgtatttctgtacactggcaacaaaagtcagaaattgagattttaaaataccaggtataatggcatcaaaaatatgtaaattagggataaattttaaagatgtgtatgatttacacattgaaaaatataaaagatttctgagattaatttaaaaaaaacctaaataaatggagagatataccctatcatggattggaagacttaatatggccaagatgtcaattctttccaaattgatccatagattcaaagcaatccccttcaaaatcctagcagacctatttttttagaaatcgacaactgattttaaaatatacatgaacatgcaaaaaaactagaatagtcaaacccagtcagttctcattattcccagtagttatcatccataaaatatccataaacactaaattgcaaattctgaatcattgctcctagatgaaatacagagttgggttcctgagagcttccaatcacaacattcatcaatcaatacataaacttgtttgatgttctgtttaaacacacgtttttgagtatatactgttaattcattaacattgaaagctatcgttcatattttgaatgaagtacttaggaacaatagacagcagatcagcattactcttgggggccattttcaacagcaaaatctccaacaagaagtacaaaaaggcaaaaaatgtggcactgcatagaccacagaaaggatgcttgttcatgggatgagagctgaaataagaagacagaacgttgccttgtttgaccttacctgggaatatgtgtcctgggtgactcaaattttttgccactctgtgtatgtccatgaatggctgagaaagtgtcatgggtattgacttggggttacaagcaaattttagcaagtaggcagattcacaaatatggaatctgtgaatcatgcacattaaacaaagctttgaaaaagataaagttcatctttaaattttgtttaaactacctgatttcaagactaagtataaaacaacagtaatcaagacagtgtggcattggtataaagatgaacatatagagcaatggaacagaacagaatcgagaaataacccatatgtatgtggtgaaatgattttttgacggagtgggaaggcaattcaatgaggaaacaataatgtcttcaacaaatggtgttgcagcaattgaactgccatgtgcaaaaaagcaagcaaacaaacaaaaggaacataaatcttgtctttacctcataacatgtataaaaattaattgaaaatgtattctaagcctaaatgcaagagcagacactattaaataccatgatgaaatggtagaagaaaaatcttgatgacctcaggttggcaaagatttcttaaatagtacacaaaaagctacaaaacataaaagaaaaaaatcaatatatttaatcacaatgaaaacatttgctcttcagtactctgctactaaaatgaaagggcaagccacagattggaataaaacatttgcaaaacatatgtccaacaaaggactttagaatataaggaattcttagctcagtaccaagtaccaagtattcagtaccaagaagacaaacaccaccataaaaatgggcaaaatatttgaacagacactaaaccatggaagacatatgggtagtgaagaagcacatgaagagatgctcaatgttatcagacaggagatatcactatacctccactagaatggatttttttttttttttttgagacagagtcttgctctgtcgcccaggctggagtgcagtggcgtgatctcagctcactgcaacctctgcctcctgggccaagcaattcccctgcctcaacctccaagtagctggatctacaggcacgcaccaccaagcctggctaattttttttttgtatttactagtagagatggggtttcaccatgttggccaggctggtcttgaacttctgaactcagatcatctgtccacctcagcctcccaaagtgctgggattacagtcttgagccactgtgcctgaccagagtggataaattttaaaagattgactataccatgtgttcgcaaaattgggaactggaatgctcatacatcaccagtggtcatgtaaaatggttcagccactctggaaaacagcttagcggtttcttacaaagttagatatttacctatcatgtgacccagccattccacttttaagtatttactcaaaagaaataaaagtttatgtctaaaaaaagatttgaacacaaatgttcacatcagctttacttgtaatagccccaaactgaaaacaactcacatgttgattaacagatgaatgggtgatacactgcaatacacgcatcctgtataatactcctctgcagtgaaaagaatgcactattgaaacatgcagtagcctggatgcatctccaaatcactatgctgaatgaaagaaaccagacccaaaaaaaccagaacataccatgtggttccatttgtataaaatttttggaaatggtgcctactcagtaatgacagagagcagattagtgggtgcttggggccaaggagtggggagcagcagggagagggattacaaagcagcatcaggaaacttgggggggtgatgactatgctcattatcttgattgtggtgatgatatattgataagcccgatttatcaaactgtacacttgaagtatgtacagtttattgtatgccagttgtcactcaataaagctgacattcattaatcagaacaaggtttcggaagtaagtagtggcgctggaccagactgcctttctggaatagtttgtttgtggcatcagtggaggatgagagaaggaatgtaagcagggataaagtatggagcaatttgattctcaagctaagttccaacagtgtcctttgttgagtaggggaattgaacacagggtgtcaagggcaaaaccaggtcattttagtaaattggggctggcaataatgtatgtgctgtattagaggtagagagtggggcagggatgccttcactcatccgctcattcattcaatacctgtggattcccctctatgggcctgatactcttatggggtatttttcttacatattagggacccaagaaacattcagatcttggcttcccttttaccccccacacagagagcagaatataaaagatggaatcagagaacaattctaatcagtccagtcaattcagtgtatgtttcttacgcccgcagaattaagtaggagaccacggcaaccatcccagccccagggaggagtttatgacatcagataggtgatggctggtgggttcagagtaattaagactgatggataactgcagagaggaaatctagttttcagggcaaacagatgcgtccaagagagagcccacacacgtggttggatgcagctggagatggagaattccagttcaaggaaaaggcctgggcagtatgtgtttggtggtggtcgttgaccctgaaaatagatggaatcttggagggagaaagcgagtgtggaaagtgaaggtcaggttgtgagctctggggcagcccacagtcagaggatgggtcaaagctagaagggcgagcaggccgcacgcacacacacgcaaagcagctgccttcactgacaatcaatggcagccacctgagctgtggctgagctgctgtgagccgaagcagtgggcttgctaaatgccgtcatccagcttccccttgaccctggctgtcaggcctgggtctgggagcttagggatcattttgtgcagtctgctcaccctctggctgtgccagggcacaggattttctacaaaagaaggaatctggggtgagtagagccccatgggagaactgagctgactaaatgtgagtggagaaatgccaattatgaaaaaaatgtacatatcaggggaacatgagcttgaaccttgcacagcttttcctccgcttggctgtttttatgaggacccaggcaagtggttctcaaagtgtggtccccccggaaaacaatatcagctttgcccggaacttactagaaatgcaggttcccaggcttaccctagacccactgaatcaggacctctggaactggggcccaggaatgtgggttttcccaagccctccaggggatgtcgatgtatgctgcagtttaaggactactgacttagatgttttaaataagatctctccctggcagcatccactcaaaagggggtttatattaagaacataatgtgacaacggtttggaaattgaaaagcactctacaggagtaggacattatttttgtttgtttattatttttgtcaacctcattcactcagatttcactgtattttagaacttgtttcagagattccccccttcctccttttcccttccccgaggaaaaccaaaatcttgttagtgaacaggagaattgattgaaaaaaaattcaactgctgcgggaaaggaggagactaggcacagctggagtttgcctgaaaggataattttctcagtgacattgggtttgttttgtttctttcagtgtagaagcacgaggctgatgactcatttaccattggaagacttcaaatccaaactgcagttgtcaaaataagattagtgctttcagacatgatgaaagagagggcatggtctcgaaaaggcaagcttgggttttgcctgcatttgtggagccctaactcatagcaagctttcctgtgggagtgggcagagaccccatcgtttacccagttgagtgaaatggcagccctaataacccacttctccttctctcttgctgtgataaacaatttctgatttctacatctcagattaaataacagcaagagctataaaaagtagagggtgtctcctaaaggtgttcatttgctttaactccaaagatgagattaaactgtcattggtgtcaacagcgtgcagtgcagcttgtctaaaattctgaaacgttggtgaaaccctttgatttagccctggatgatggccatagcctttgccccatgctccgtgctcccccctcagttctgcctccttccggtgtaagcagatgaaagtttccaagttctctggactgagatgcaggcgccagggtttctaaaggaaggcacttacatctagggtgcatgggagtctctggggaaactgtggttgggtttgagcacagctttggggctcttggcagcaaatcttcactaattagtttcacctgggaagactgagttatccctcttaaaattctccaggcactgaaacaagcgagcagattttgctgactgtcagatacatgctaatggtagctccctggcaaggtgtatctcaaatttggccaggtctttttgttatgaaattccaaattacctactttgctgtatcacttcaatttagcatagaactcaaaaaccaaacttggccagagataaattttagaacgttaggatctaatattcatgtttgtagggatttttttttttttttttttttttttgagacaggatctcgctctgtctcccaggctggagtgcagtggcgcaatcatagcttactgcgacctggaactccctggctgaaatgatcttcctacctcagcctccctagtagctgggactacaggtgtgtgccactgtgcctggctaattttttaattttctgtagagacaagatgtcgttctgttgcccaggctggtcttgatcctcctgcgttggcctcccaaagtgctgggattataggtgtgacccatcgtgccggcccatgtttgcagcttttataggtacccaataaagtgaaactattagaattgggatgtgagcaaaatttggttgaagttcaactctctgccatgcttaaataggtatgtgccactgacacttttcttttcccccttgatttaggaaaggagaaggatgctaacatttgttgaatacttactgtcagccctgcacttcgggaggccagggcgggtagatcgcttgagctcatgagttcaagaccagcctgtccaacatggtgaaaccctgtctctacaaataatacaaaagttagctggtattttgctgagcgtggtggctcacgcctgtaatcccagcactttgggaggccaaggcgggcagatcacctgaggtcaggagttcgagatcagcctgggcaacacggtgaaaccctgtctctacttaaaatacaaaattaggcgggcatggtggcacatgcctgtaatcccagctactcagcatgagtactgaggcatgagaatcgcttgaacctaggaggcggagaatgcggtgagccaagatagcgccattgcactccagcctgggcaacaagagtaaatctccatctcaccaaaaaaaaaaaaaaaaaaagttagctgggtatggtggtgcgtacctttagtcccagctactcgggaggctgaggtggaaggattgcttgagctcgggaagcagaggttgcagtgagcctagattgtgccattgcactctagcctgggtgacagagccagaccttgtctcaaaaaaattaaaaataaaaaaataaaataaaaatatcttctgtgagacagatgctttgcccatctagattatctcactcaaccctacaaataagatatttaacctttttatgaaaactgaatctctcaaaagtcccttacttgaagtcgttacccagctggggccaagtctggctccaaagtcgatattcttttcacctgcctgcctcacccctaccctttctgaggagacgtaactgacatcctgccctcccccagtggtggctctcttcatcatttttcatgtcacctctttcaggtccaaataaaaatttggagaaggtcaaaatcatcttttcagttcacactgttaaaaatggaagcctgctctctcaccacgctcaactcccctttcctgcttataacgtatcacagatttttacctatttgctttgtttactatcaatcttctatcaggtatgtgctgctaaatgtttaacaatcaggtctccaggagacaaaagctctgatttgtagatttgccaatttccatggtgtaaatactcccaccgtggacatttcaagctaccaacgtggcctctttgaatgcagctgtgggaagagatgcacatcattgtgtgagtcagtacgagctgcctctagcacatgactggcccctcactggaccatcagctctataagggtaggaatttttctgttgttgtccactgattcactgttgttttcccagcactccgaaccattccatcgttgaatagatttattaattcagtcatccacaaatcagccacatggcagatgctagatatttgaactagcatgctgagcaagacaagcactgtggctgccctatgtggcaggtgaaatagacatgaaataattagttgcaaattaagcattaaattataattgtgttgaggattacaaatggaaactctgagggaggacttcacccctagtggcaggtcagagcttcctgagaaagcagactttcaggtgagtactaaaggaggtatgagagttaggtaggggaaaaggaggtcaggaagaggcttgagcattctaggcagaaggaatgacctttgcaaaggtcccaagacatgaagaagcttgatttgaaaatggagagggccatgtaaatggagcagagaaaataagaggaggcttgagataagactggagaggtgaaggggtgggtcttgtagcccccttgaccatcacattagagtttttggactccatcctaaagcagtgataagccattaagggttttaagcagaagagaggcaggagcagattactctggctacaggaggatgctaggctgggatgaatacaggaaaaccagttaagaggttgccatggctgttcagccaacagatgatagtggctccatggtggcaggggagatgaagagaagtaaatccaggattgactgggtctgaggggtacaggagagggaggaatcccatgactttcaagtttctgttcccatcttcgaccccagggtaaaagttagctattctaaaaattcatctttgctaaagagaaattaaagaatacttcagaatcatccccagctgtcccatttctgcccagtgacatttattaattgagacagagctctaggctgcccagcaagggaggctgtcaagtcaacaatagatggctactaagcaccaactgtgtgaagtgcatggcattatacaggcaccgtaaggaacaccaagacttagagacatggctctgtccttcacagagcttacaagagtaggtaagagagatgagttaggaacacctgacaaccctgtgcttgtgtcacatgagcatgagttcattcatccattcaacaagtacttgttgagcaaggacaaagtgccaggcactgtgctagataccgggatgcagtggatagcagggcacacaggttccctaactgtcatgacagcttttctggtgtccatagctgggggctggctctgagatgtcattgtgttcttgatgcaggacaagtgagccccaaagtggggcttagcccatgagggttcttggctttatccaggagagaattcaagggcaagcagaggtagatgtaaacagctttattgaagagacggtgttacagccctggcagtgttacgcctccgtgactgctcctgcagagcagggctatccttataggcagagagtaggtagtagctcagggcagttttacagtcatatttatacccacttttttttttttgagatggagtttcccaggctggagtgcagtggcgcgatctcagctcactgcaacatctgcctcctaggttcaagtgattctcctgcctcagcctcccaagtaactgggattacaggcacctgccaccacatctggctaattttgtatttttaatagagatggggtttcaccatgttggccaggctgctcttgaactcttgacctcacatgatccacctgcctcggtctccgaaaatgctgggattatgggtgtgatcccagtggcctatacccacttttaactgcatgcagattaagaggcagtttatgcaggaatttctagggaagggatagtagctcttggtttgtcaggtcattgacacggagggggtggttactcccaggtgttgccatggcaatggtaaactgacatgtcacactggtgggtgtgtcttatggaaagctgcttctgccccagccctcaatttgatcctgtgtccaagccctgcctctggagttaagctctgcctctggagttgagtcctgcctcctacctcactctgagccctcttctggtgtgtgaatacctcttgctgaggatgaggagaggcagagagacttggagagaattttgttcccatctcagtcatcttctgaggaccccacatctaatggaggagggtattcttaggactttagggccattcctcctgggaggcagggcatctgggcctttttcattgttcattcagcaaatgaactcttatggagaccaaatacatgtgctaggacactgtgctagactctggagagtcaaaactgacccgcttataatggggcagatagccgtgatcaagtccttccaataccatgggatcagtgccgaaatgctagagcggagccatgtctatagtgctgtgggggcccaggggaagaagccttaactccagccaacttgaaggaggcttcccacaggaggtgacatttgactggggttgtgagccattcatgggggtcaccaggtggagaaggtggaaggctgtgccggggcagggggagctctggacacagtgcttcttatccttcagtgaaatcctcctggcctcagagagaaagaagggctgtttttcaaaagcataaggaatcatccaaaaaacatctgtatttgtttcaaaaggaaatggccactgccagaaaaacagcaaagttgttttgtcagaacccagtctgtatttattcctttgtctttgtttaattagattaatccctgaatggtttcccttgggtcggtacaaatcgctcgtggccataaatccccaacaattctaaaaacagtaagaaaggacaatccgcatgaagccaactggcaagcttgctgtttgtgggacagttctgggatgcgagcagtaatcttgcacccgcacataggtgtttggggttcttttagcctcttggagaggggagcaaggacaacaatcactcagatttgtttagaagaggaaagctgaaccgtagggtctcatcattaaagggggagactgactcctggatctgggcaccttccccagggaggattgtggggactttttatctgttaggttcaatgacattcagcctggctgcacactggggctacctgggagctttgacaaacaccactgcccaaatcccaccccctgccagtctgatttaattgtggtggggagtaccttggcatcaagattttcaaaggtcgctgctgcttctgtagatgggagcttgcagttactcacagactcttctgcggatatcccagtctgtcctgaaaggaacaagcatatccttgcctttctctacctaccctgtgcagggaagccttttagaaaaaaagattgttccttcaaggtcctggttccttgcttttgaaatggtactttcaaaagggttcttttgtaacaggttgatttttttgtcttcctccattattataaaagttcctgttagaaaatttgaaatcagacaattataaataaaagaatgaaaaatcacctgtattcacaccactacttggtaaccatggtaggtagagttcctgccagacccctgatggggcaaggcagcatctgcagtagagattgggaggacccaggtggagaagctgctgccacccttccagagctggttccagcatgctggagcgtcacctcccagccatcaggacttcatgcagggacactgcccacccacttagggagcttagagtctagtaagagagacacagtacatccatcgctctataaacacatacgtagttaacattatgattcatgccaggagggaaaagtgcaggggtgggctgacagctgatgggtgaggccaaaagtgtaaagaatgtttaaaggtcctcatagcaagaggttaattttctcatcaccattcaggcaacccaaagctacttcagcccggaactcagaaacctactgctgttcccaagaaagcaatgcttttcattgaactttgctagaggtgcttaaattttcccaggcctgagaggatctgtggtgctgccagacttatccttccgaagcacaacttgggtgaaattgctggtctccctttttaaagtttttcccttgagtggtccccattgcccgctgattggagttcagcctatgcagcctgtgtgcagagatccctctgcctctggtgtcaatggtctttcccatcctctcttctgctacttcccctggaatttccagagcagaattcagctgccacgcctctcctgcttccctcttctgtttactcacgcgtcccaagcctggagtgctgtttctctttctccatacctgccagcctttcccagtccttgctagacttgcagtaatctgtcccaattctgaactcccatagttttcttggcacttctcttagggattcttatcatgtcctacctcgcatgttagttatttaggtggcatctaacaaccactctggcctttctgttcctcaaataggatcagtttgttcttcaggacctttgcattcactgttcttttggccgaaaatactcttcctaaaggttcatgttattaactcctagtaggatacaagctgcgtgacagcagaaaccccttgtctgttttgttcaccatgatatccccaatgcttgggacatagtatgcgctcaaaccgtatttattgactaaatgaatgaatatcgtatgattcagacatttcttatatctggcctagctcatttaggttttgtatttctttgattactcactacgatttttgtattagctgaagttttcttccggttatgggtgttttccttacatctgaatccactgaaaatctacattggactttctggttggagttctcaattggaaatgtgagatataaacttactggtgagaggtaaaagaatctgtgtctataaggcttttttttccatctactttattgatttgggagtgaaacttcttttaggagtttaaaaccagaattcttatttgtagactcttagacctaagcgtttttaaaatgtgatgatgtaagttttaatgtttaaaattgtttaatgcatttaatagagatgttgaatcaaatcagcttttatctttttaaaaatcaatttggatattttatatttatgtaaaagcataataaactatgaaactcaaagatctagaagatgatatgaaaatgtagccattggattcaggaattaatcaagctttctaggtaattaagtttttttaaatcatacctgttgtagtgatagcttttttttgtttgagacagtcttgttctgtcgcccaggctggagtgcaatggtgtgatctcggctcactgcaacctccacctcccgggttcaagccattctcctgcctcagcctcccatcttctgagtagctgggattacaggcgcgtgccaccacgccaagctaatttttgtatttttagtagagacggggtttcaccatgttggtcaggctgatctcgaacttctgacctcagatgatcctcccgccttggcctcccaaagtgttgggattacaggtgtgagctaccacgcccggccagtgatagcttttaaccagagaaaattctctttaatatattcaacccctttaatgctctctgattatctccagttttaatggcaaaatcaatggtacagctagctgtttcatggtatccaagctgttctccttgctgggaaatagtgttagagactgagtcagtgatggatggaagatgcctttaatcttttcatccaccaacatattcttagttctgttgcagtagatgcatactgcaagtccattcctacgttgcatgtgaataaacaggcagagcttagcacttagtggacatgtaataaatatttgaccaaaataagaccacgaatagacatgtatctatttctccctggcaatgtttgttacctctacctaacctcttttggcttctccattttcctcgtttgttattagaatgaatacatagagcacaaagagggttttcaaagagctttgtctcattccttcttataccagcaacagagtgagattctgtctcaaaaaaattatttaatgtatttcaaagtaattccaactttgaaaaatgtgttttttttatgttatttatttattttgagacagagactcgctctgtcgtccaggctggagtgcaatggcacgatcttggctcactgcaacctccgcctcctgagttcaagcgattctcctgcctcggcctcctgagtagctgggattacaagcacacaccaccacactcagctaatttttatatttttagtagagatgaggtttcaccatgttggccaggctggtctccaactcctgacctcaagtgatccgcccacctcggcctcccatagtgctggaattacaggcgtgagccaccgcatggctgaaaaatgtgtttttatatacatgcagaaactcacctggaaagaaaactcaccaaaatgttaacagtggttgcctctgggtagtaggattacagatggggggattacaggtgaattttcttttatctatttttttatgttttccaaattttctactatgatcacgtatcaaaccttacaatgtttttaaaagttactttggtgagggctctggagttccctgttgcctcaccctgggctgggagcattctcaggtgtgcctgacgttgtgttctaacatcgtgactttgcctcagtccaggatctgtgtgccatggaggaccacaactgtgagcagctctgtgtgaatgtgccgggctccttcgtctgccagtgctacagtggctacgccctggctgaggatgggaagaggtgtgtgggtgagtatccctccagctgggcttggtagggaaggacaagttaagcatggtgaggaggaggggagactcacgtgtacctcccacatatttgtttcctcacctttgggtttccacaaagtgctcagttgtttggtgtagttgttaggcagaatttgaactttaaaggcttcatttatggctgaggtcagcgttttcttattctgggtctccagtaaaaggaacacttatgataatccatgcaaatataactgtgtgttactgcatctcttgaaaaggatcgggtggattttcttcaactttggaggatatgtttggaatggcctgacttatatatagctcaggtgttatacatgaaatttacttgggtgggttgctgagtgacacctcaaagacaacgggcagccttcctccctaatgtcacctatagctcagtgacaggccaaagtgactgccaggtgaaagagcccagccatatgggctcagcgtaattagacggcgtggtcagaggaaactagcagtagcctcaaaccctcaaacacaagcccaggtaatgaggctcaagggcagtgcttgatgctgcagacatcccccctgtttatctacaaagcctttgcaacttaacatggtctcattcctccttataccaacaaacagtgcctggtggatagtaggtgtttcataaactgaactgaatacttatgaggcagaaaatctagaaggaaaagaacttgactgacatcaaaactggaatgtaaattttctgctaaatcctgcattttgtcttccgtgttctattgttttcaggaccctattttattttgcttcgcacaaacagggtatgcttatatttttgcacatagaatttgcattttccagcacaccttaattcttagctagggatgtggaaggcaaaacaaaacaacaacaaaacaaaagttaggtggtagcctgcaattggcaggtgagtgatgagagtatcgtgggtttgtttttacacactgataggaatgaaagcaacctctgcctctgactctcatcaaagggccacaaatgcagctggtctcctgggccttagggttgtttttcttcttaatctgctggtggtggccatgatagagtggcagggttccacacccactaccactagcaaaaaagaagccaacatatatacccatggttatttttgcttcattaatttttattatgcaagtaatacccgttcatagagaaacttaaacagatgagaaaaatcactattaataggttattgtattttctaccagactttctccatataaatatctactttaaaacattttgttggacaggtgcgatggctcacgtctgtaatcccagcactatgggaggccgaggcgggcagatcacttgaggtcaggagtttgagaccaacctggccaatatggcgaaacccggtctctactaaaaatacaaaaattagctgggtctggtagtgtgcccctgtattttcagctagttgggagggtgaggaagaagaatcacttgaccctgggaggcggattttgcagtgagctgagattgtgccactgcactccagcctgggtgacagagcgagactcatctcaaacaaacaaacaaataaacaaaaaacattttgtaaagatttaacaaaatgaggtcacactgtctattttgttttacaacctgctttttcccctctactatttgttaaatgggtagaaactctgagtgctgtttggtcaggaggaaatcaagccattgtgagttaggctggtggaggagcttcaggaaacaggatgagggtaatgggttgattaggacaaggggagggacagtagaacacagggcttgcattggtcacagggagtagatggggcaggaagcccaccttggcccatgggaaactggaggccactgaaaaacccatttctctgagtgtttccaaataattacctgcttgtccgtgtgtagtagagaacctttgtatctctgaggattttgctgtaacttttgggatttgacatttattgaagagctacaagcgtgggagggtagatgctgtcattgccagagagctttggcgtgctgtttatcggagatgggcgtttctctgcggctgcttgactgcatataagaatgtctgcattttctcagtggggatccaatccaaagagtgggaaaatgggagagactgcatcccattgcaacccaggtctcctccgtcagatgatcctagcatcaccagccttaccaccttttccccaatgccctttacagcggttcactaagcactcgatctgttagaggctgggagtgagatgattaagcaggcagtacttttgttgccagtagcctttcttagggactccagacaaaatcctacaaggttagttgctgctcaatagggctatggtgagtacaacgcaaatgatagagaaaatattggccacggaaggtcagagagagacatcctaatggctaggctggaagatctgagtgtggaaggaagggtggcaattggacaaatgtccaaggcagggggagagatgaagggcagtgactgtggaggtggcaatgctcttcaagcattagggctaagtctggcctaggagtggcagggccagctcctgggagctggtaggtcagagagagactgttacagtgaaaaggccaaactgaaagttaaccaggtggcctaacctgagggccagaaggcgcttatcaaagatggagactccaggtaccagacttagagcaggaaatttagaggagaggctggtgagaactctggacatactccattagtagctgatctggggtgccctgtgtgtagatggccagggaacattaagaacagagtgattatgcctcccagttaatacaggacaatcccagtttatgccctgttggcccaattcttttttttttttttcttttttttgagattgagtcttgctctgttgcccaggccatgatcacagctttgcagcctcgacctcctgggctcaagcgatactcccacctcagcctcctgagtagctgggaccacgtgtgtgcaccactgtgcccagctaatttattttttgtagagacagggtctccatacattgtctaggctggtctcaatctcctgggctcaagtgatcctcctgccttggcctcccaaagtgttgggattacaggtgtgagccacctcgcctgatgccatttctttttatttttagacagggtctcactctgtcacccagactggagtacagtggcgcgacctcggctcactgcaacctctgtcccccaggctcacatgatcctcccacctcagactcccaagttgctgggaccacaggtgcataccacacgtctggctaattttttgtatttttggtagagatggggtcttgctatgttgcccaggcaggtattgaactcctgagctcaagtagtctacctgcctcggcctcctaaagtgcagggattatagacatgagccactgcgcccgactgaccccatttcttacccagctggcctcatttcttgatggcacatcttttcactttgaaaggggttccagtttggatgataaattacataatcaccctagttaaggctgtccaatttgacttaaactgttaagttcagcagagaattcctgtatacatgaagtaggagatgaagttgaagacagcagaaggaactggattgttcagggctttgaaaatcagacgtaaagcctagattttatctctgaaaaagagccaccgaagggtttatatttgggtgacaaatgcaaagcttcatttttaggaaactcaacctcatggggaactgcagggtgtattccaggagaaggatggcaagaagtgggaagaccagataggagattgtagcagttatcgggtgagagaggataggaaccagccaggatttgaggtgcaactgtaggaaaggagagggagacagtaaggaatgaaagaaggtgctgtacataaagggaacaaggagaagtcaaaagtgactctaggccaggtaccgtggcacatgtctataatcctagtactttgggaggccaaagtaggaggattgcttgagcccaggtgttcaagactaacctgggcaacatagtgagacccccatctctaccaaaaaataaaaaaattagttggacatggctggatgtggtggctcatgcctgtaatcccagcactttgggaggctgaggcaggcagatcacctgaggtcaggagtttgtgaccagcctggccaacatgatgaaactccatctctactaaaaaaaaatacaaaattagtcaggcgtggtggcagtcacctgtagtcccagctactccagaggctgaggcaggagaatcgcttgaacctgggaggcagaggttgcagtgagccgagatcgcaccattgcactccagcctgggcaacaagagcaaaactctgtctcaaaaacaaaacaaaaatattagccaagcatgttggtgcacatgctggtggtcacagctacttgggaggctgaggtaggaggattgcttgagcccaggagatcattcaaggctgcagaaagtcatgttcacaccactgtactccagcctgggcgacacagcaagaccttgtctcaaaaaaaaaataaatgaataaaattgaaaaagactccatgatcttgagcttccatggctgtgagagtgatggcaacagtgatggaagagtgatggaatcgattttcaaaaagataaggccaagcgtggtggctcatgcctgtaaacctaggactttgtgaggccaaggtgggaggattgcttgagaccaggagttctagacaggcctgggcaacaaagcaagaccctatatctacaaaaaaattaagaaattagctgggtatggtggtgcacacctgaagtcccagctactccagaggctgaggtgggaggggtgggaggattgcttgagcccaggatgttgagactatagtgagccatgatagtgccgctgcactctagcctgggcaacagagtaagaccttgtctcaaaaaaaaaaaaaatgttggggtgataattagtagtcattgacaaggtgaattttgaattcaggttagacaccacaaggacacgtcaagaggaagcagaaaactcggcattaacatgacagagagagtagaatcaatgctgtagtcaggaagcagcatagtttatttcttaacttccagttattttctattttaaatatttatgtgtcagttggtttgttttgagggcatctagacctttaaaacagtgctacctgagctgaaatcccaactctgctacttgctaggtgtgttaggccatttgcgttgctataaaggaatacctgagattagctaaaagaaaaggtttaattggctcatgattctgcaggctgtataggaagcatgacaccagcatctgcttctggtgagggcctcaggaaacttccaatcatggtagaaggtgaaggcggagcaggcatgtcacatggtgagagcaggagcaagaggtagggggaggtgacacactcttttaagaccaaccaaatctcacatgaactaactgagcgagaaatcacttatcaccaagatgataacactaagccattaatgagagatccacagctatgatccaatacctcccactaagccccacctccaacattgggaatcacgtttcaacatcagatttggaggcaataagcatccaaaccatattattccactcctggccccccatatttcatgtccttctcacatttcaaaatacaatcgtgcctttgcaatagttccccaaagtcttaacttgttccaggcttaactcaaaagtctcaaactccaaagtctgaagtgtcatctggagatgagttccttccacctatgagcctgtgagatttaaaaaaaaaaaaagaaaaagtttttacttccaaggtacaaggtgttataggcactgggtaaatattctcatttcaaaagggagaaattggccaaaacaaagggcaataggaccatacaactttgaaacccagcagggcagccattacattttaaaactccaaaacaatctcctttgactccatgtcctgcatccaaggcacacaggtgcaaggggtgggcccccaaggccttggttggctccgcccctgtggttgcagggtatagcccccaaggctgccctcacaggttgttgggtgcccatggctcttgcatgctaaggttgcaaactgccagtggctctaccattctcaggtctggagggtggtggcccccttctcacagctccactaggcagtgccccagtagggactctgtatgagagttccaaccctacatttccctttggcactgacctagtagagtctctctatgaggcttcacccctgcagcaggcttctgcctggacatccaggctttccaagacatactctgaagtctagggagaagctgccaagcctctttcatgcctgcattctgtgtgcctgcagacttaacaccacatcgtagccactaaggtttatggtggcttgtactctctggagcagcagcccaagctgtacctgtggccctgtgagccatggctggagctggagcagcctggatgtgaggagcagtgtgctgaggctacacagggcagtagtgccctggacctggccccccaaatcatttttttcccctaggcctctgggcctttgatggggagtgggtgctgcctagaagatctctgaaatgcctttgaggcctttttcccatgtcttggatatttgcacttggctcccttttagttacactaatctctctagcaagtggttgctccacagcctgcttgtattcctgtcctgaaaatgccttttctttctctgccacatggctaggctgcaaattttccaaacttgtacattctgcttcccttttacatataagttccaactttatttctttgctccagtatctgatcataggcttgaatgctttgctgtttagaaattttttccatcagatagctaccttaggtcatccctcttaaattcaaacttccacagatccctagggcatgaacacaacccagctaagatctttgctaaggcatagaattggtgacctttactccagttcccaataaattcttcatttctatctgagatctcatcagcctggcctttactgtccatatctattagcattttggtcacaaccacttaacaagtctctaaggagttccaaactttccctcatcttcctgtcttcttctaagccctccaaactcatctgacctctgcccattgcccagttccaaagctgcttccatactttcaagtgtgttaatagcaacaccccactctcagtaccggttttctgtgttaggctgcttgcattgctctaaaggagtacctgagactgggtaatttatttgaaaaagaaagagtttaattggctcacagttctgcaggctgtacaagaagcatggcattggcctctgcttctggtgagggcctcagaaagtttacaatcaaggcaaaagccaaagggggagcaagtatgtcacatgacaaggacaagagtgagagttgggaggtggggagatgccacacttttaaacaaccaggtctcatgtgaactaactgagcaagaactcactcatcacctaggggtggtgctaagccatttatgggggatctgtccctgtgatccaatacttcccaccagggtccacctgtaacacgggggatcacatttcagtgtgagatttggagggcacaaacatccagaccgtatcactaagcacatatctttaagtctaatttctgagcttattttcctcacccataatgtagaatagtaatatatacattgtaaggttttatgggattaaataagatagtgagtgacattcccaatatactctaagaacttagcattattattacaacacctactattatcgtaatttcctgtatatagtgaagtatggagtgagaagagagtgaaggactgagccttggattgcagtcacatgtagggagcaggaagtaggggcaggaaaaatattcatgaagaagtagcttaaggctgggggagagagagaagaatcatggaacatgataggaagataatttcttggccaggtcaatattaatgtcatgcttcagcatggccaaaggtaacaggacttagagaaaaagccatcaacttgagtcacagattcaccgctgcaaacatttcagaactctgccagggactttgctaggcttgaggagcacaaaggtgaccaggaggccattgagaatggcaaagggggcatgggtaaagggcagatttcaagaggcagggagtgggtgacaagaaagtgtgggcagcaggttcaaactatttatttaaagaaatttggtagaagttaagcatgtccagctgatgcagggcaggcaagtcccaaagtggagcttagcctacctgggttcttggctttgcccagggaagaattcaagggcaagccagaggtagaagaaaacagctttattgaagaggcagtgttatagctccatgactgctcttgcagagcagggctaccctgtaggcagagaatagcagcttaggcagttttgcagtcatatttatacccactttcaattgcaggcacgttaaggggaggtttatgcagaaatttctagggaaggggtagtaatcgttgggtcattgcccaatgatagtaagggatggtaactcccaggtgttgccatagcaacagtaaattgacatggtatactgattgaagtctgattgaaggctgctttcaccccagccctgttttagctagttctcaatcaggtccgatgtctcagccccacctctggagtcaagtcctgcctcctacctcacagctactagtgaatttatgcagtagattttcagtttcaacactttcatagctactgctatgaaaagcacttcttttgttaccaaaacattaggggttcagtctaggtcctgttgcttgttgcacagaaagccaatcactgagacaacaagtattaccaggaaagaaggcttcagtcaggtgccatagccaagaagatgggagatcagtctcaaatccatctccctgactgactaaaattagggatttaggctggatgtggtggcttatgcatgtaatcccagcactttgagaggccaaggtgggaggatcacttgagaccaggagtttgagaccagcctagacaacatagtaagactcctgtctctacaaagaataaaaaaaaatcagctgggtgtggtggccaacacctgtagtcccagctactcaggagggaagattgcttgagtctgggaggttgaggctgcagtgagccatgattgcactactgcattccagcctgggtgacagagtgagaccctgcctcagaataaaataaaataaataaaataaaaattaggggtttatatagcagggaataaatgtaaacatatgggggaaaacaggaattagggaggagtatggaagaggagttggtcaacacgcagcaggtggttggttaggcagtcataaatggggaggggtctggcatgtcattgtgcagatgcagtgatctggtaagtttcagccccttgatactgtcagagagtcctgacggtttggttcttgagaagggttctcagataaaacaaatgtaactttctcaagtttcaagactggaaaggtaaatttctatgtttattcaaaataaaccataaacatcagttctgtgggacaattgggccggtttcactttgattcatccctgaattattactgtgacctgcatgaaagttcagttcttagtcatggactcagcatttttttatagatttccacacatttgagtaagtggaacgttcaattccagcaccagagttccaactccctgacagctcatttcaccattgagagtcctgaatttattccgtattcaatggtggattgctgactaagaacctcctctgctttagtggagtccctgaatttataattcatcagctgccactaaagtcatgttcattgccatccaaaactatttttcaaagaccatttatctagatttctgaacatgaattttctgctgtacttactcacctggtgtttacaaactgtcttttattttggggtaactttggtcctgtttgcatcttatctacccaggcagattgtaaacccttgagggcaaaaccacttgtacttttcatctttcacagagtggacttgaaatacattttcttgaagcactgactgaggttgattgcaatctcatgcattcatgttttgtaaaaaatatttcccccattgactggtttttaaattataaagtcatttttgcttattaaaaaaaaaaagtcaggccaggcatggtggctcaagcctgtaatcccagcacttcgggaggccaaggcgggcggatctcttgagctcaggagttcgagaccagcctggtcaacatggtgaaaacctgtcactacaaaaataacaaaaattagctgggggtggtagcacacacctgtagtcccagctattcaggaggctgaggtgggagaattgattgagcccaaggagatatgtgccaccacccccagctaatggaccaacaccgtctctaccaaaaatatataaagaaattagccaggcatggtggcacgtgcatgtagtcccagctacttgggaggctgaggtgggaggatggcttgagtctgggagggctgaggttgcagtgagccgtgatcatgccactgcattagagcctgggcgacagaatgagaccctgtctcaaaaaaaaaaaaaaaaagaaaagaaaagaaaagaaattttctctgggttttaaatcctgcatttggaattccagttatgccttggagaagagaggttttgtgagtctgactctgtgtgtgtgtgtctaatgtatgctcagcaagtaaattggttctaccatttctctaaatgacaaatttggtttttcttactttgttatcagcaaactttaaactccaaatgctcctctttaaaatatactatttctgctaatgccattcccttgcagacggagtcctgctgagaaaacgttagaattggaccaggttataaaacagaaatcattgattttagggttttattacctgcagcaaggtatcatttattcttagagacagtggagtgatttctcacatgttgggcagagaatgaatgtggcaagactgacttctgactctgggatcttagcacttgtgatctggagggctaaagagctacagctggagaattactctttccatttgtaaacaagaatgtagacattttaggcataaatgactgagaacagattttgttgaagtagatgagaacttggaacaatagagccatcattgagttatacaagaggtcacctccatacatctgcctccctaatcttgacctctctttttatgagtacaattttgcaaccaagaaagttatgcaaacaacccaaaccacttggcaaataacattagagctgaatgccctagaactctcttggccttaaaaaactgttagattcacatgcctggcagtgggttcttccatgtttaaccactgcactgatggcctcatctgccgtctccagaagcctagcagtgtgtcagtgggtggatttcaaattgagatgggatttgacaccttggagttttacagactggagacttgggacccaggaatgcgtgaatcctgccttgccaatcacatcctcccccttagttccccagagagctgtgtacacaaagaacaaaaacattatgagagtcaagatccagagaagctctcttatctcatgaattgggcctgtggttagctgataaatggaaaacatcattcagagaggggaatcctaaaaaactatatatgcaaacccaccttagtcattttatttttatttaaaacacataaatgtatacttagtaaaaatcacttttatgcttttaaaaaatgctaattttaagttgaagaaaaaagtatgatatttacaaatctttttttttttttttttgagatggtataattctgttgcccagattggagtgcagtggcatgatcttggttccccgcagcctcaatctcccaaactcaagcaatcctcccacctcagcctcctgagtagcttggaccacaggtgcatgccaccatgcccagctaatttttgtattttttgtagagatggggtctcgctatgtatcccaggctggtctcgaacccctgggctcaagcagtctgcctgcctcggcctcccaaagtgctgggattatataaaaatcttttttgcataaaccatacccataatgtgttgtctatgattttttagttttggtttctttaaattggaacaaggatttcaagacatctgtaaagcagtctaacagcagaactcttgtaaattttaatgggaaatttcccaatgttttacatttgtttcatccatgcctggttctatagcaattttggttagcaaattgctttaattttttccaaagctttcaacaaaatttttatttttaaaaactcagtttcttttagtgcttatattttattggtttttattttatttatttatttattttgagacagaatttcgcttgttgcccaggctggagtgcagtggcacaatctcagctcactgcaacctccacctcctgggctcaagcaatcctcccacctcagcctccagagtaaatgcgacaacaggtgcccaccatcatacctggctaatttttgtatttttagtagagatggggtttcaccatgttggccaggctggtcttgagctcttagactcaagtgatccacccaccttggcctcccaaagcgctgggattacagatgtgagcctttttgttttgttttgtttttttgttttgttttgtttttgagatgtagtctcacactgtcgcccaggctggaatgcagtggcacgatcttggctcactgcaacctccacctcccagattcaaatgattctgctgcttcagtctcctgagtaactgggattacaggcgcctgccaccacgcccagctactttttatatttttagtacagatggggtttcaccatgttggccaggctggtcttgaactcctgaccttgtgatccacctgccttggcctcccaaagtgctgggattacaggcttgagccaccgcgtccagccccagcccagtttttataatatttaaattacttacaataacatgtacaaatgacacatacaggtttggaaacaaaagcaaccttgactctaacaatggctcttaagttttagcgtgcctcagaatcacctggagggcttgctcaaacacatattcctgggtcccactcccagaacttctgatcagtaggtctgggatggagcctgagaatgggcattactgacaagttctcaagcgatggttgatgcagttggttcacagaccacactttgagaaccaatgtttataagaatacatctcagtcaatggaaaaagtacacaggtgtcctagagcccatgtgttccaccaaggctgctttatcagcatacaacccagccaatgtgaggcgtgtacaggtgttttaaaacacaggtgttctaactgccttgagtgtgtagcatgccctgggttatcaggattcatatggtcagagggaatgaaagcgttgcttgatcaggagttgcttaaggagtgatcagttaaaagagcatcttagtacaacttttttcttgaaacacccgagccaatttggatactctattctataacattctggaaaaggggaaagtttggagtatgtggcttagattcaaagcctaagccaagccttcaacacctctctaaattattacattagtctaaattacggggccagcataattatgggatatccctctgagagacagaaatggccgggctcagattataccccatggtgtaagagaggacattcaagagaaaaggtagagtgtgagtttctgacttttaggtatagagacctgaccactcattgttgcagcaccatcaatgtcctacaatttggaagtcagatcagcagctcctctctttgtaggggatactaagaagtgggtggccatagataggactggctgactgatggcaggcacccatatccaggattgggagattttcatcatggtgaatcaagcccagcatgaggaagttgaagctggggattgttgactgctaacacgggcccaagcaggctctggcatggccaactcctgtgacaaacagactggaccgtgtgccagggtttagccttcctcgatctcagtgttcccagtgtcaccattgattcttttgatgatcccttggttcttgagaaatgagaaatgaactattagaaggatgtggtgctagctcagtctttatgttatgactcaactctagcaaccagctgatatccaatgacgttgagatcctgagatgacatgaatgccctatccccaacataatggcttgtgaattaaacctgcaaatactaggttctactagaactctttagggagctgaagttacaaaaacaatatttagactgaaacttttttttttttttgagacagagtcttgctctgttgcctgggctggaatgtagtggtgcaatctcggctcccgggttcaagcagttctccctgcctcagccttccgagtagctgggattacaggcacctgccaccatgcccagctattttttgtatttttagtagagacagggtttcgccatattggcaaggctggtctcaaactcctgacctccggtgatccaccctcctcagcctcccaaagtgctgggattacaggcgtgagccaccatgcctggcctagactgaaacttaatgaaactttgaagcaaaagaataaacgtaacacaggttattaccctttacaaatcttcagtgtccctttgcatctttttattgctatgctaaatatgtcattatcttctccatgcatggttttgctttttaaaattttacatatgtattacttttgtagattctatttccttgttattatttacacacttttgatattaatataatcctaaaacattgtagggagtacttttttttgaaaagggactggtcttaagctcctgagctcaaatgattgccctgcctcagtctcccaagtagctgggatttccaaaaacttttttttttttgagacagggtcttgctctgtcaaccccagagttgaccctaggtgcactctctttttctcatttcacctctaatccaacaggaatcctgttagccccaccttcagtatttaccaggtgtattagtttgctagagctatgctgtggtttggatatggtttgtttggcttcaccaagtctcgtgttgaaatttgacctctgtggccaggcacggtggctcatgcctgtaatcccagcactttgggaggaggctgaggccagtggatctcttgagctcagaaggttgaggccagcctggcccacatggtgaaaccccgttcctactaaaaatataaaaattagccagatgtggtggcgcacacctgtagtcccagctacttggatggctgaggcaggaggatcacttgaacccaggaggttgaggctgcagtgagcagaggtggtgccactgcactccagcctgggagacaaagtgagaccctgtctcaaaaaaaaaaaaaaaaaaaaaaaaaaaaaagacaagaaatttgattcccaatgttggaggtgggacctgctggaaagtgtttgggtcgtagggacagatctcttcttataagaacaccagtcatattgaattagagcacgccaccctaataagcacattttaacttggttacttctgcaaagaccctatttccaaataaggccacattcgtaggtaccagggtttaggactccaacatgtctttttaggggacataattcaacccataacttccagaacaccactccccctcatcccctgcaacatcctggtttaagcctccacccttcctccctgggattactggagtcactttcttactggttttctactctcagatttgccctgtcagtctattcttgactcatgggtccagaaccctgcagtgactcccaactcattcagactaaaagctgaggtccttgcatggcccatgggtccctcctgactgcccccttctcatctcccacctctctccctcctccagccaccctggcctctttgctgatcctccagcccaccaggcagagtcccacctcctggccttcgcacttgctgtttgttttgcccaagataccctctcccagatatcctcacggctcgtattttagtcaacactcttcctaaccacccaccttctcagagaggcctctcctgaccacctctattacatcccacctgctacccactcccccactgaccctactcctattcattgttttgcttttctccagaattttctttatctcctaatagactatgctatttacttattttacttcttatctgctccccactcccagcatcattatccaaatatacgctccttgggggctggaattttggattattttcttacttgttctatccctagcacctaaaacaggacctggcccatagtaggtactcaggaactaatgaatacatttttgttcattacacatatttgtgtaatgaacacatatttgtggaactaatgaaacaaatgaaatatttgtggaacacaggaacacatttgtggaactaatgaaaaatcagccagtgtattttctcatacattgttaaatcatttacccttattcaatgttcatcttattttctaggattttttgttgttgttgtaaacaatgctattaatagtttattgtatataatttcacccttttcctggctatttctttgggtttcacgtccagggtgaacattgtcaaattgccttccaaaaggatctttctcaatttataatgcccctaccattaataacgctgctgcctttctaccactgggttttatctcatcttatttttgccagtttactaggtgtaagtgcaccttgtgatgattttgatttgcaattctttaacttttaaatacaattgttcacatgttctttagtttacttcctatatcttcctatatgaattgcctgatatagactcctgattttttttgaggggggcagagaccttgggttcataactgtttatcctactcttttggggggcaataatattaatcctaattaatatctgttatcattttgccctcatcctaccattcccttttcctctgtttgcatttctaattctgaatgtgttttattctctccagctgtggactactgtgcctcagaaaaccacggatgtgaacatgagtgtgtaaatgctgatggctcctacctttgccagtgccatgaaggatttgctcttaacccagataaaaaaacgtgcacaagtaagttacacacacatgcacacacagagaaatatttgctgttactgctgtggtgactgtgaccatggaactctctcaagtatagattagcaatataattatgtcatgggggtctaataccttttgccccattcctcctctgtcaggactttcatgacttggcttaagaccatagaccactgtatctcaacatcactattcaaggaatatgatgaaggcaccatgtgtaggactgttccttcagcatctgctgagcatgctgacaatccgagcaacttacttcctgctaactcagcctgactgtgcccatcagcactaacagggcttgagatgttttcattgaagctttgtggcttgtgggctttagctctgactccacgcgagaaaatcgctgagccaaaaagaatcataagtgatttcttctggtggaccgcagtttgcaaagaactgctcatgttttgtttgagctatttagttcaattggattttaactgtatacataaaaatcagaattaatttcagctcccaaaatttgaacataaaattcgataaactaaagatgatcattagttttgcaaaaaagataataactagttacaaaaagattccaaaagtgttctattaaatataaaggtacatcaggagacttaagggattgtgtatggattattatccttctatagggaggatcacttgagaaaagcttgcttgttaagtattagggccaagcatttataaaaagtggactttaataacaatctagaatagggtaaggcacctcagagacatgcatcagtgagaaaacaggattttaattcataaaaagttcatgtacctacaacctttctaaaatgtattcactatgtaaaacaggatacatctgcacaaaacctttttcaacataaacttacttcctactcttcaatacctaaatatcagcagcttacaaacaccagagctggaggtttgggtgatgtatggaactataagggacacattaggtcaaaagcatacatttctggagccccaaccatgtgccaatagaaatgagtacggcaaggtccttaagggagaagataactgtggctgagtcttggaggtggagctgtcattcactaggcagaaaagggtgaggtgggggttccaggagaaggaaagaagttgaagatgtgaaccaagcagagaactgtagtctccatgccccgtgcatgactggcatatacagtggtttatttgttttgtttattgaaagagtaagtaaatgaatgagtgggctgctgtgtttgtggtctcccttcccttctgaatattctgaactgtaaaatagcagcctgtgctgtcgtcgtggttggggagttgtggttgttgggctgatgagtcagtgttcctcatcaaagaggaggccgtgggctgccagcagcgggccttggttctaatcccagcttctctgctttttctcttggtgatcttgggcaagttacttatgcctcagtttcctcagttacagtacaggatgataatgctgcctactgcatagcattattctttccttttttttttttttttttttttttgacactgggtcttactctgtcacccaggctggagagcagtgatgtgatctcggctcactgcaacctccacctcctgggttcaagcgattcccccacctcagcctcccaagtggctgagactacaggctcgcaccaacacacccagctaatttttttggtattttttgatagcagtggtgtttcaccatattagccaggctggtgtcgaatccctgacctcaagtgatccacccacctcagcctcccaaagtgctgggaatacaggcatgagccacagcacccggccatagcataatcttgaatactaaatgaggctgggcacagtggctcacgcctgtaatcccagcactttgggaagagaagcaggaggattacttgagcccaggagtttgagaccagccctggtaatatggagggaccctatttctacaaaaactgttttttttttaattagccaggtatggtgacaagtgtctgtactcccagctacttgggaggctcaggtgggaagatcactagttgggcctgggaggttggggctgtagtgagccatgatggcaccactgcactccagcctggaggacacagtaagaccttgtcttaaaaaaaaaaaaaggctaaaaagggatgatgtgggtttcaaagactttatttattatcattatgtttttttagaaataggatcttactctgtcacccatgctggaatgcagtggtgcaatcctagctcattgcagcttccaactcctgggctcaagcaatcctcccacctcagcctcccaaagtgctggaattatggtcatcatgagccaccacacctggcctccaaaactctaaaaaaatgagtatttaactgtgcatataccacgtgcctgggctacatttaaaggtgcaaaaaacattcaagatttccactgcaagctggtgagggaccttagccatagccacactgagtagctgagtcatggtgccaggagttatgtgaccaagggcctacagtgtgatgcagccaggaccacagcaggagttagaggaaggagaccagttagaccagaacaggtgagatgctgccttgcagggatgaggactggagaaaaacacatatcctagccagtctcctacctgcctctccagactgcacacactggctggggtcacctgatttccaccccagcaccagccctagttcccagagtggcaccatcttccccaccctgtggctcagcatgcctcctgtcccagatccccagcccagggtggtgcaggcaaggagggtgttggagccctggaatcagaccctggaagtagataccgcagcatagtgggactgggagaggaggtttggctaggagccacgggaggggctgatccagctgtgaggtctcaccagctaggcagcgagcccagcagtgcagttgtcagaatcaagatccagaagtgggccgccccaatgcgtgtgcagggaagagtgctgggagactggagggttcgtgcaggcagcctcagggcagtacatcccttagaagagccctcttcccaccatgcttggggtgggcaggagccagacccaggaggagggagacaagaggaagaaaggagacagagtacttggaaagctaagagtagaaaataaggcaaaagcccagtcgtaagaatgaaacactcaggagtgctccagatctgtggcagggacaagaactgagaaatagagactagttaaaattacagaaacaggatagaggcagaagctcagaaccgaagcagccaccctgttttagtgagtaccaaggcctcccaccagcttccagccaagtcggcctggttactgctgtgatgttgaaagatttttttttaaaattctacttcttatacacttgcaaaaaatgaaagaaactcagtttctcaaatttcagcctatatttttaaccaaaagtatatttgaaagcgaatacaattagtaagtgtgcaactattatctcaaaaaggtagactagtcaatgtaataaaccaagcatggttaatttatgattaagcaaaaatgtacataatagggctttatgttcatgaaccagtactataatttgaaatatgtaagtggtgttcaaaaaagcaccacctttatatcaatttcttaccctagagcagcccatccaaatctagacgggagaaaggtggaaacacacaggtaccatcagtttgcaaaaagttagcaagacttttctttttctggtattgttataaaacatacataatagaaaatttaccactgtactcattcagtggcattaaatacactcacattgtgaaaaacgcatatcctagcctgtctccttcctgcctctccagaccacaccccctggctggggtcacctgatttccacccagctgtaactatcctcaccatccatctccagaacttttcatcaccccaaactgaaacgctgtacccattgaacaataactccccattgcctgccctgtcaaccaccattctactttctgtctgtgaatttcaccactctcggcacttcatgtaagtgggattatatggtatttgtcctttgccgtctaacatatttcacttagcataatgtcctcaaggtttatctgtgttgtagtatatatcagaatttccttcctttttaagactgcataatattcaattatatgtatatatcccattttgtttatccatctgttgatggacgtttgggctccttccaccttttgcctattgtgaataaagctactataaagatgagtgttcaagtccttgctttcagttcttctgggtttttatacccagaagtggaattgctggtcctatggtagcaagactttttgagatctagattgaaacccttattcttgagccaagcatgagaaagaacactctcagatatccagggtcttttcaccagaaagatctatagaggacttcagtctgctggacagggattcatgtctttggtagcaaggagactgtgggctttgagtctaatgcttaatcatctaatgcctgtaaggatgaataaaggcaattgcggacaccatcttttgcatgttgccatttattattttcgtgcttggaggtcattatactcattgtttttcagtctccagtaataacttggttgacatttccatccttatttttcaaataagaatgctttgcacagagtaaggcactgaatgaatatttttgtgtttgcactagaaacaaaacacagaaggaagtaaactttttaaagtagagatggggtctgctatgttgctcaggttggactagacctcctgacctcaagtgattctcccagcttggcctcccaaagtgctgagattacaggatgagccaccattccggaaataattttatactgaatcagcaatagaagaactacaaagtatcggttgtcaggtttcttggccagagcatagttaacatactgagtgccactaccttcctacagcctgtaatatgccacttttgtgactccctatgtggataaatcaaacactttcagctggaagaggctttaaagttcaacctagttcttgcccaactatccatcctacaatattctcactgtgccatcatccaacctgcatttgaatacccccactgacaggatattcactataccccatggtagttcattccactttgtatagctctgactcttagaaagtgattccctagactgagctgatatctatttccttgctcttagaaatgaacaaaacaaatttggctacttgcgttctttgtggccactaagagtgagtcatatcagagtaactttatttcacttagtagactagccaggcatggaaaatgtagtagtgaccatctaaattttaataggcatttgaccaatttgtgtgtggaggaatttgtgctcaatgaatgattggttggtttgtaactggccgaatgtctgtaaccacaggatgctaattgttgaactgagatcctcctagaaggaggtttttaaacagcttgctgggaagaagccttatggagggatgagagctatcttccattcatagggtcccccgtgtttcttcatggtgtgcaatgtgtatgtatctaaactctcaaaaacacactccagtaagagtaataccaataaccttttattcattccacaaatatttgttgagtatctactatgtgtcagatatgattgtagacactgggcatgcagtaataaattaaacagaccaaaaagaaaccccaccaatatctgtccttatggagcctacattctattggagcaggataagagaatactacaggtctcaacagcaaagtaatactagtctttgattaaagatttgaaggcagtgagagaaggaggaaacctttgaggcagaggtagaaatgaaattctatgaaataaaatgatctgtgatactatcacacagcaccagtacaaaatggatatgttttagtccatttgtgttgctataaaggaacacctgagactgggtaatttataaagaaaataaggtttatttggctcatgattctgctggcgggaagactgggcatctagtgaaagcctaaggctgcttccactcacagcgggaggtgatgtggagccgacctgtgcagagatcacatggtgagagaggaagcaagagagaaaggatgaggcggtgctctttttaacaaccagctctcatgagaactaacagagcaaacgtactcattactgtgaggacagcaccaagctattcattagggattccccaccatgacccaaacacctcccattaagccccgcctccaacactgtggattaaattttaacatgaagtttatgggatcaaacatccaaactgtagcagatatgcacacctgaagctatatatatttattgtttttagcaatgttccctgattatgttcttctccaaatcacaggacacttcccacattgttcttttttgtatattatttgggccgttttccatggcaactagtttcacaaagtacaaatgtacaaatgtgtacatttatttttagtactttttctgattacaaaagtaatacaggttcattgagggaaactggttcctatagaagtgaaattctatgaaataaaatgatctgtgatactaccgcccagaaaaaaccactgtttttgtgtttgttttgctttttgagatgggtttctcaccatgttgcccaggctggtcttgatctcctgagctcaagcagtccttctgccttggtctcccaagttttgagattataggcgcacactactgcacctagctgataaccattgtttatgccaatttggaacatttctctccagtctttttttaatgtatgtgtatggatttatttttatagagttgagatcatgcagtataataataaatcataagcattttgacatgtcacttaaacgttatcaaaaacattttaatgtctgtgtaaaattctattatatgtatatgtcagaatgtgttcaggtttttttggctgctcaaataatattgtgataaacattcttatgcttgaatctttttttctgatcattttcttaggaacacaacaaaaaaggaaatttattgagtcaaaggcaattaacattttaagtcttttgatacatattcaaaattattttctaaaaacgttttaccgatttatactctaccatcagtgtttaagggggcaatttttatttttaaattaaattaaattatttatgatttcaataggtttttggggagcaggtggtgtttggttatatggacaagttctttagtggtgattctgagatttttggtgcaaccatcacctgagcaggatacatagtacccaatgtgtagtcttttatccctcaccaccctcccaccccaagtccattgtatcattcttatgcctttgcatcctcatagcttagctcccatttaaaagtgagaagtgggatatttggttttccattcctgagttacttcacttagaataatggtctccaactccatctaggttgctgcaaatgccattcttttgttcctttttatggctgagtagtattccatggtgtatatagacactgtattttctttatccacttgttgattgataggcattgggactggttccatatttttgcaattgcaaattgtattgctataaacatgcgtgtgcaagtatctttttcatataatgacttaatttcctctgggtagatactcagtagtgggattgctggatcaaatagtagatctacttttagttatttttttttgagacggagtctcgctctgtggcccaggctggagtgcagtggcgcgatctcggctcactgcaagctccacctccagggttcacgccattctcctgcctcagcctcccgagtggctgggactacaggtgcccgccaccacgcccagctaatttttttttttttttgtatttttagtagagacagggtttcatcgtgttagccagggtggtctcgaactcctgaacttgtgatccgcctgccttggcctctcaaagtgctgggattacaggcgtgagccaccacacctggcctacttttagttctttaaggaatctctacattgctttccatagttgttgtactagtttacattcccaccagcagtgtaaacggaatttgtccatttcatcttaacacatggacacgtgatagggagcaacacacaccggggcctgtagcaaggagtggggagagggaaagcatccagaagaacagctaatggatgctgggcttaatacctgggtgatgcgctgatctgtgcagcaaaccaacatggcacacatttacctaacaaacctgcacatcctgcacatacaccctagaacttaaaataaaagttgaaggaaaaaaaagtgtttcttaagggagcaatttttaaaaatgttgctgattttctaggagaaaatttcttcttcttgcttttttatcatgtctttaatacctgttcttcataaaattatccaattatatatatctaatttataaatgtatgtttattggtgttattatttgattaatgaatattttccagtataagtgattgtaagggactcttacaaatttcatgaagcaagggactgtgcctctttgttcaacactgatcctagtgcctgtcccatggtaaatgctcagagaatatttactgaatgaatgaatgaacagggaagttaacatgtcttcatatattagacattcaagagagagggaataataaagatctgagctaaaataaaaggaatagaagacataaatcaatagagataattggtaaaaaccaaaatgtgttttttttagaagattaataaaattgataaatgtctaaccagactagtcaaggaagaaaaaagagagaagacacaaattactaatatcaggaatgagaaagtggacatcaatacatatcctacaaactttgaagcataatacaggccaagcatggtggatcatgcctgtaatctgaacactgtgggaggccaaagcaggaggatcacttgaggcaaggagttaaagaccagcctgggcaacatagagcccatctccaccaaaaaaaaaaaaaaaaatatatatatatatatatatataacacacacacacatatgtatacacacatacatatatatatatatatacagaaaaatcataaacaagtttatgccaataactatgacaacttagatgaaatggacaaattccttgaaagacacaaactactaaagtttacccaagaataaatagaggctgggcatggtggctcatacctgtaatcccagaactttgggaggcttaggtgggaggattgcttgagtccaggagttctagatcagcctgagtaacatagcaagaccccatctctacaaaaaataaataaattaactgggcatggtggcaagtgcctgtagtcccagctactcgaaaggctgaggcaggagggttgcttgagcccaggaggttgaggcttcagtaagccacgatcacaccactgcactccagcctgggcaacagagtgagactctctccccagaccgaccaaaaacaaaagaatatagtctgaatagatctctatctattaaaagaaatggaatttgcactttaaaaccttcccacagagaagacttcaaacctagttggcttaactggtgaattctaccaaaaatttgaagaaaaactcatactaattctacacaaattattccaaaaaattgaagaagaaagaacaattttcaactcatcctatgaggctatcagtaccctgatacccaaaccagaaaagaaagacataaaaaaagaaaactatacacaaatatttctcatgaaatacctgcaaaagttatttaaacagtttctagcaatcaaatttaacaatatattaaaaagtacaatacatcacaaccaagtgggatttattccaggaattcaaagttggcttaacattcaaaactcaatcaatgtaattcataatattaacatattaaaaagtcaaaaccatatgagccatctcaatagatgcagaaaaggcattggataagatctgacattcattttttctttaaataaactttcagcaaattaggaatgaaggtggccaggcgtggtggctcacgcctgtaatcccagtactttgggaggccgaggcgggcggatcatgaggtcaggagattgagaccatcctggctaacacggtgaaaccccgtctctcctaaaaatagaagaaattagctgggcatggtggcaggcacctgtagtcccagctactcgggaggctgaggcaggagaatggcgtgaacctgggaggcagagcttgcagtgagccgagatcgtgccactgcactccagcctgggcaacagagcaagactccatctcaaaaaaaaaaaaaaacggaatgaaggtaactgcctcaatctgataaagtgcatcagtgaaaaaactatcagctaacatcatacttaatagtgaaagacaatgctttctttatcagatcaggaataaaacagaatgtccactcacaccactgctatttaatattgtactggaagttctagccagtgcaataagacagagaaagatcaataaatggtacctagattgttaaaaaaaaacaccatctttattaacagataacctgatcacctgtgtagaaaatccaatggaatctattaaaaagctactagaactattaatagcaagtgaatttatcaaggttgcaggacacaagatcaatatacaaaaataagttagttttatatacttacaatggaccatcaaaatatgaaatttaaaaaaataccttttcaggctgggcacggtggctcatgcttgtaatcccagcacaatgggagaccaaagcaggtggatcacttgaggtcaggagtttgagacaagcctggccaacatggtgaaagcttgtctctactaaaaatatgaacattagccaggcatggtggcaggtgcctgtaatcctagctacttgggaagctgaggcaggggaattgcttgaacccaggaggcagaggtttcagtgagctgagattgcaccactgcattccagcctgggtgacagagcaagactctgtcaaaaaaaaaaaaaaaaaaaaaaagacaagccactcaataaaaatgggaaaaatatttgaatagaaacttcaccaaagaatatatagagatggcgaagaagcatatgaaaatatattcaacaacattagtcattaggtaaatacaaagtgaagtcatattgagataatcatacccactagaatgactaaaattaccaagtgatgatggggatacggagcaactggaactctcataaattgctggtgggaatgtttaagcagttaagcatacatgtcccatatgactcattcattatgcaaaaggaatgaaagcatatgtccacacaaaaacttgtgcattagtgttcatagctgctttatttgtgatagccccaaactgggaacaggtaaccagcccttcagcaagtgaatggataaacaaattgtggtataatcacatagtgaaatactactctgcaataaaaaggaacaaactattgacacacatatgaatctggatgaatctcaaaataattatgctgaatgaaagaaaccagacaaaaaagaatacatactatatgattacatttatttaaagttccttggggagataaaaaaagaagataaaaaataaaattctagaaaatgcaaactgatttatctggatagaaggtaaatggttatttgggactggagagagtggggaagaatgaattagcaagagacaggaggaaagttttgagagtaatgcatatgcttattattttgattgtggcgatggtttcatggcaggatacatatgcaaaatgcatcagattgtttttcttgagtatgtgcagtttggtttttgtcaattatacctcaaaaaaactaaaaacaagtagaagagactgtattattccaaaatttctatgtcataaaacacaaagagaggctgtggaaatgttctggcccatcactatcctatgggacactctggttgatggaaattctctgtttgcatcatacaatacagtagtcaggagccacacgtggccactgagcacttgagatacagccagtgcaacccagtaactgaatttttgtttcgttttgttttgtttgttagagacaggctcttgctttgttgcccaggctggactgcagtggtacagtcatagctcatagctcactgcaatcaccaactcctgggctcatgagatctcctggcctcagcctccctagtagctgggactacaggcaggtgccaccatgctcagctaacttaaaaaaattatttttctgctgggcacagtggctcacgcctgtaatcctagcactttgagaggccgaggcgagtggattgcctgagttcaggagttcgagaacagcctgggcaacacggtgaaaccccgtctctactaaattacaaaaaattagctgggtgtggtggtgtgtgcctatagttccagctactcgggaggctgaggcaggagaattgcttgaacccgggaggcggagattgcagtgagctgagatcgtgccactgcactccaccctgggcagcagagcgagactctatctcaaaaaaaaaaaaaaattcttttttcagaaatggggtcttgctatgttgctcaggctggtctcaaatttctgggttcaagcaatcctccagcctcagcttcacaaagcattgggattacaagcatgagccaccacccctggctgaattttaattgttatttcattttaatcaattttaatttaaatagacatattaggcagcatggttctagattaagggagactaagcagatatgaaaacgagatacaatctctgaccctagactagatcctgtactggaaggtgaaaaatgctatgaagaacataattaagtcaactgacaaaattagaatatggatggtagattaaatataagtattgtatcaatgtaaacttatgaaatttataaccatactgcagttatgtaagagaatatccctcctcttaggaaacacggactgtttttaagggaaaggaccagaatgtatgtaatgtaccctcacataggtcagagagatgaccaagtaatcacaggaatggggtaaaatgttaacaaaggtgaatctgggtaaagagtatttaagtgtttcttgttttatttttatgtttgtaactttttgtaagcttgaaattgttttcaaagaaaaagattttttaaatgcctttatatatgactatggtattacaattatattgtttataaagactcccagtgttttaaagctacattatgaagcatttatggacaaaataatacaatgtctgggccaggtgtggtggctcactcctgtaatcccagcactttggaaggctgaggcaggtggatcacgagatcaggagttcaagaccagcctggccaagatggtgaaaccccatctccactaaaaatacaaaaattagctgggcacagtggcaggcgcctgtaatcccaactacttgggaggctgaggcaggaggattgcctgaacctgggcggcagaggttgcagtgagccaagattgcgccactgcactccagcctgggtgttagagtgagactccatctcaaaaaaaaaaaaaaaaaaaaaaaaattactcaggcatggtggcatgcactggtaattccagctactcaggaggctgaagcaggagaattgcttgaacctgggaggtggaggttgcagtgagcctagattgcgacattgcgcttccgcctgggcgatggagcgagactctgtctcaaaacaaacaataataataataataataataataataataacaacaatacaatgtctggggtttgcttcaaagtaatgtgggatcttactatagagagtggggacatagctgaaagccaagcagccatagattgattctcctgaagctgggtgatatgtacatggatttattatactactcagtccatttttgaaattggacattattgtatattttgcttaacatttccataagtttaaattgggaaaaattggcatctcactcaacattttttcctttcaagaatattgtatatctttcccttactcagtttgtttcctctggtatggactgggaactctcatttataccaaattatttgttaggaagattatttatgcagttcaaatgttccttaaaataataaaaaccctcatcaaaacaaagactccttttaagattccatcagtggtcatttatttcaagcaattttaaacaatgtgtccaagttccactatgggaaaatattttgctcagattctgcaataaaagtttctttccatatttaaaaatacttatacaaaaaatacaaaaaaaagaaaaagaacaaaaacaaaaaaataaaaatacacaagtaaaatttcattatgaaaaatttcatgaaatacttttaaaaaaatattttggtttaaattaatgtatccctagagatcacattctctgtgaatcttgaggtaaaaatcctatttatgtgcagctgagcccaatgaggtaaccaggaggtgttttgaactcagagtatttatgcctttcactcctaggccttatttttcccaggatatgattttgtgtcttattgtttggctcattgtttgatgggtttaagtggtttggagtttggctttgggaacgtttaattgttttaattgcttaaattcgataaaacactcagctaaaccattctcagcctgcagtctggcaaataccccatcttcattttagtggctcttacatgaatcaagacaaggaaagcatgttcacaaatttgtttgttgcataaacgttttgtaatatgtcaggaagtttgtctttgcctagcagaagagtccaggtataataataataataatagaagaagaagaaggaaaggaagagagaaagaaagaaagaaagaaaaagaaagaaagaaagaagaaaggaagaaaggaaaggaaggaaggaaggaagggagagagaggaaggaaggaaagaaagaaagaaaagaaaagagggaaagaagaggaggagggaggggggaagagggaagagggggaagggaaagaggaaggagaagggggaggaagggaaagagggaggaggagggaagaaggagaagaaggaaagaaggagaagaagtttctcttaggagaggccatatctctaaacatggaagtagctttattgggagaccccttcatggtgtgactctttgaggtgtgggattttacctgtttgggaaaatgaagactggaaatccctggttttcctatgctagctttattgattggtttgccattcttgtgatttttccttcttgccagagatagactactgtgcctcatctaatcacggatgtcagcacgagtgtgttaacacagatgattcctattcctgccactgcctgaaaggctttaccctgaatccagataagaaaacctgcagaagtaagttacagtgggagttggagaagggcttgttctgctaaatgctcctctagttagttttcctttccgtgcaaatcttaagcaagatgtgcttgtattcagcattgtgtctattaacattattctcccctttattttactttttggctcactagatcctattatgtggatgatttttaaatattgaataggtctggccattagattcaattagccaagtggacccaagctgaagctcccacctatgtgaaatgcaggtgcagtctccctcccccttattcccatagcattggggtcttggaaaaagaaaagaatgggcccagagatgagaggtagaaggagttggtttcttctactcctacaagataagacacttgacggatgctaagagggaggacattgcagctttattccctttgataggaaagaagaagaaaaatgagactctaggacatcccagcaatattcaaggggtacagggtgtcagcgggttgatattgtggatgtactgagtgcctcaaatgcctgtcatctagcacatcaaagggcatgattggggatctgagcacaggccccagagggcacctgcttaagacaaaccattcctgagagactgctagaatggacggcccacaaggacagagacgattatctttttctcgctgctgaattctcaaaagctcaaagagtgcttggcactcatagatgtgcacaatgtttgctgaatgggaatgagtaagtgaatctttctatgatgtatcatcctggagaaattgaagctattttttttttaattcttcaatcttgttagaaagatagccttttttaggcgtgcaagttgtgaattttttttcagaaagtctttccctagttagtccacacttatgcacactgaattgtttggggtctgctgacaatgtcattcgtagaactctctggagcttccattgagggatgtaattttctgtatgttccttcacccatttcttcctgatggtgtgtacagcagtgttctgcctggcaagactgcgttttgaaaggtttcacatatatcttttttgaaaagcaccatgagctatttaactgaatccagatgagtcacattctgctcatagcacagattaactttcatactcattctagcaagtgctaaactgtgtatagtggcagatggttgcaaatcctggattttgaaacggagcctgtcttataaaactattctcactgccttgtgagggtacaaaccctgcacacattcaagcattaaatgaaaattttaatggagagcattcagaatgtgaaaacaattagataagctatttttcataagaccacacatgcctgcaataggtcagagggccaacttttctggtctggccactcctctgtgctatttacaccttttgctaggagtgggtgtgtgagggactggctgcacccaggggaaatcactcccaggtggactcaaatttgcagacccaaagctcttcagtgggcggtgattagatctggttcagctcagatgctcattgcaagcttcctcatgtgttactaatggaggggaaaaaggaaacaagttaggcttggggccatgggcggaggacattttcttgacgttctgcatgtcttaccaaccatctgagtcccttaatttctgctactccctccacacccttcctggagaggcacttggaataagagaagatccaatgcaatgcaggcatcattatcatgggaaggagaagactgagaaaggaagagcgagtagagagggagtgaccgttttggagtggtctgagcgctacagattggtccccaggtgggcctgtttgcaagcaagctgtggccccgaccagagtccctaatgctcatccatgtatattcagtgggtatagcccctctttagccagggttcttactttttcatccaagaaaaatgaaatttgttcctaaaggccagtgtcctcatcagccctcgcccaacgtcccgcctcatcgttacattttccattgtctttgctgtgaacccaaccctgactcctgaggtcagcctgcaggagcggcccctgacttcatgcttgcactcagtccattagggcagacagctgtaaacggaagcgagtgctcactgtctctctggagcattatgtggatgaaggaagccaagaaattgggtttaaaaatctggagtccgttattagaagcctgaggtctcttgagtgatctgagcattacaaatcttcagcccaggatacagccatttacgtttaataggaggttgatggatgtgggtaattttcaaatctaatatgaaatctatttttaaaggaatttgatgtcatcgaaattaaactgggggaaaaaagatcaaggcagaatcctactgaagaaaagattcttggccaggatttgttcttgctcctcatctgggcacaatttctcctcatggagagtgctatcatcagtttaaggcatgaattattaaggcagtagtgcaaagcacagaaactgcgactgccttgcctgcccaggtagagccctagggccaaatcagatgtgggttcatcccctgtgctgggctccaggatccctgattctggtaccatgatgagtgctctcaaaaattggtgtgaagcccacgggttcgactgagccaagagacgtgacgtccaggcttggcaatgtcactcatattggttatgtgaccctgagcagctactttctacttctcaggacctggatttcctaaactgtaggaacaggacttcctgccttaacaccctgttgcctctccagtttttttgaaacttactatctgtgcactcagctggtatcaaaatgtactacctggggtcactgatctttcatggtttcagtcttacctgctcagggctccaactctttcacaagttagcactcagaaagatcgtttgatttgttttctgacagtcctgtcatctgacctcacagagctttagtggacactctgggccttaccagattaagttgtgtccatcctgtgggtgccatgtcagagcacctatcatggtaccagatataggatgcacagtaggtcctcaataaatatttagtgaatgaataagtgagtgagtgaatatctgagaagcacacacatgaggaaatatgacaaaagggtggtgagaaggcaaagagccactgttaaacgtctgctaaaaagaaccatttggagaaggtttttttttttttttttttccagacagaatctcattctattgcccaggctggagtgcagtggagcaatcttggctcactacaacctctgtctcccaggctcaggtgattgtctcacttcggcctccctagtagctgggactacaggcgtgcaccatcatgcctgactagtttttgtatttttagtagagacggggtttcaccatgttgtccaggctggtctcaaactcctggactcaagtgattctccctcctcagtctcccaaagtgctgggattacaggcatgagccaccacgcccagccgaaaagggtggtatttgaatagctgcctgccagattgctgggtgataacctctttaagaatctaaatggttttcagttgaattatctcatgtgtaaatcattctttaaaaaaaaaatcttgctgggcgcggtggctcacgcctgtaatcccagcactttgggaggccgaggcgggcggatcacaaggtcaggagatcgagaccatcctggctaacacggtgaaaccccgtctctactaaaaaatattaaaaaattagccgggcttggtggcgggcgcctgtagtcccaactgctcaggaggctgaggcaggagaatggcgtgaacctgggaggcggagcttgcagtgagccgagatcgtgccactgcactccagcctgggcgacagtgagactctgtctcaaaaaaaaaaaaaaaaaaatcttgcttgaaacattatttactaatttattttaattttttaaaaatgtttttctttttatatttttattgtatgtgctgctgaagcgagagcttcagcatatttttttatatttttaaaatttttaaaatttttttttatatttttaaaattgttacaacatagttgtacctctttttggtatttattttttaaaattgacataaaaattgtatacttgtatacaatatgttgttttgcaatacgtaaatataaatttttcttaaagacaacattggcttttttagtgtggcaaaatatatataacataaaatgtaccattttaaccatttttaagtatctagtccagtggtattaagcacattcacattgttgtgcaaccatcaccaccttcaatctccagaacttcttcaccccaaactgagactctatacccattaaacaataattccccagctcctcctcctccatctcctggcagccaccaatctactttttgtctatgaatttgactattctaggtgcctcatataagtggaatcatagaatatttgtccttttgtaaccagcttatattgcttggcataatgtcttcaaggttcattcagttgtaggacgtgtcagaatttccttcctttttaaggctgaataatattccattgtatctatacatcatcctttgtactcatcctttgatagatccctgggttgcttccaccttttgacttttatttattaatgcagctatgaacttgggtgtgtatacccagaaatggaattgctggatcatatggttaattctatatttaattttttgaggaaccgccatgctgttttccacagtggctgaatgctgggttttaaaaagagagttgactaaagatcatttcacctttccctgatggtgtaatggagtgattcctacaggcagtagactgcgggcccttcctgttctgtgtttgtctgtctgtctgtgactggtgttttattgccaggcctattttcctccatcaaagctcttggcttgtttcctggcactcagttatggcctgcacaggtgaggctgctgatgagtttcaggtagatgaatagaaactgcacacagctaacaatatcctgcctctcctcacatgggagtgagctccagagagagtgccaagggtcagtgacacagcaaggtgatgtcttttcttctacaccagccctgcatgttgtgaccttctctccatgcactctgtctgcagccattctgctcatactctgggcatgaagcaagctccagccaccagtcacctgggagggcacgtcacggattcttttttttttttttttttaattttttaatttttttaaagacggaatctcactctgtcacccaggctggaatacagtggcgcgatcttggctcactgcaacctccatctcctgggttctagcgatcctctcacctcagcttcccaagtagctgggactacagatatgtaccaccatgcctggctgatttttgtattgttagtagaggtgggctttcaccatgttggccaggctggtcttgaactcctgacctcaagtgatccatccgcctcagccttccaaagtgctgggatacaggcatgagccactgtgtccagccagatcctttaagagaccctttgaggggtccttcaggtctgggtcccattcacatttccatttttactagcagtggatcttgatcaagttattaacctcgctaaacctcaattcctcagctttgaaatatggataacaggccaggtgcggtggctcacgcctataatcccagcactttgggaggctgaggcgggtggatcacaaggtcaggagatcgagaccagcctggccaatatggtgaaaccccgtctctactaaatatataaaaattagccgggtgtggtagcgggcacctgtagtcccagctactcaggaggctgaggcaggagaattgcttgaacccaggaggcagaagttgcagtgagccgagatcacgccactgcactccagcctggatgacagagcgagactccgtctcaaaaaaaaaaaaaagaaatatggttaacaatcacacatatcttgcagggtcaaatgaagttatgtttgtaaagtggttggcacagcatctggcattcagcaggtatttaagaaatggcagcagctatgatgctatgattatcatcactaatgtaactatcagactgccactaatagtgagaaaaataaagatggcatggtccctgctcgtggaactcagtctagtgaaagaaacagactttgaagcatcacagatacaaaacatactacataaccattgtgatgaatgctacgaaagagaggtcctgtagaaagaactgacttcatctacgaggtcacaaaagatgacaaaatgatgttgagctgatcgtgaaggaagatagaggttagccagtgcagcaaggagccactgagacaagagggtgatgtgtcatatctttaagtgatttgtggatgtgagcttcgtcaaataacttttgggcagatacatggtaaaaataaaatctagtcattactttatgatttcagatcatttcccctgtatcagttatggtgctttttgttcacacaaaaccggaaatccaattaatggtgttttaagtcagaaggacttttattttttacctgacaagtccaaaggtggttggtcctatggatggctcagtgactcagtgatattatcaagaacccagactctttctgtctttctattctggcaaagtatgttgcatttacattttcatccttgtcacctcttggttacaagatggttgctgcagctaccagcatcatatccttacactacaagactcaaaggcagaaaggacagagagcagagaaaagcatttctctttatacacttttgtcttttttttttttttttttttgagacagagtctcactctgttgcccaggctggagtgcagtggcacaatctcagctcactgcaacctctgcctcctgggttcaagcgattctcatgcctcaggctcccaagtagctgggattgcagacgcatgccaccatgcccagctaattttgtttttttgtttgtttgtttttagtagaggtggggtttcaccatgttagccaggctggtcttgaactcctggcctcaagtgatctgcccaccttggccttccaaagtgctgggattacaggcatgagccactgtgcctggccacctttgtcttttcaggaagaaaaatctttcttgagggcccccagtaagcttcttatgtttcattggtcagaactagggcatattcccaccccttgaccaatgactgacaaagaagaacatggttgccacgctggcttagaccagccatgactcatgcttgggggtcatggggtaatggttattggcaagacaaccaacagtgtctgccacatccccagaaaaagaacaatgctgtgcagttaaactgatccagcccagccaatgaggtcggtggtgaccttttcccgcgacaccagtctcataaagcctctccacaagctcattttgtgtccttttccagttctctatcttccctggagcctgctatgtgtggggtcttatggctttagcattttctaccaggaaaggaattgcttattggctcctggttatgacacagtttccatctgctggcagaaacacagcatggatagagtgaccttaccataggacagaattgcagtagcctggggcagcatcagagatacgcctcctccagtcccatgatactatgccagcgtggtctcaacagagcaaggcgaagcatttagatccttcttcatgaaactgccaacccctgcatccctaaatagctggatattttgcaagatcaccttttgtttattttgccttgtgccgtccaatgtcactgtcagatgtcactgtagacagaagctctctacatgctttgagcccaagtgatcaggttaacctgagagagatactggattttcttagcttttccatctttcttggaaggaggtaggctggggagcgtggctctcaccccagctctcagctctttggccactgactcagttcagctcagctcaactgagccttggcttgctctttggccatcaaagagggaaaatgctggagaatccacaggtatacttcaggtgccaggccctcttttaaacaagctcctggagagcaggagctattttctctgtgtcctgtagctcaccttgtttcctgaagatttagtgaagtttgcctgcctttccacctctactgcaaagtcttcttcaagacataaccctggccttgtcacctccaccaacattctcacctctagtcacctgtttagagccttcactgatccatcctggggcttgcaaagcccgcacgtccagtcatgctcaggtgggccagctccctctgcctcccagcctcatctctctcctcacactccagccatactcagctcctcacagctccccaggcatgcccctcgccctcatccccaggcatttgtgttcactgtcccctcatccctgggcgtttgtgttcactgtcccctcatccccgggcatttgtgttcactgtcccctcatccccaggcatttgtgttcactgttccctcatccccaagcacttgtgttttttgtctcctcaccctcaggtgtttgcgtttgctgtcctcgagtcctcatgttcttcttcctgttgagctcccttacctatggaactcctcctcctccctggggcctcctgttggccttatctcttcttggaagaccctctcaccccaggactcagtgaggcccctgctctgtgctctgcattgtcttttagttgctgtccttgtctgactcctcaccagagcctgaacccattgaggcagggcctccatctcagtcgtcattaaatctctgaatctagctcaaggcctggcacttggctggcagacaaacgaatgaatgatccgtcccggcttgcctcagcaggcagcacccaccagccctctccatgggggctcatgggagccccgaggggctgccatcagccctgggagaggtccagagtctgaaggaaggtctgcccttcttcccctcagggatcaactactgtgcactgaacaaaccgggctgtgagcatgagtgcgtcaacatggaggagagctactactgccgctgccaccgtggctacactctggaccccaatggcaaaacctgcagccgtgagtgtaccctaggggtggggtgctgatggaaggtggggtccactcatgggggcgggcgggttcactagcaaccagttgtttctggagcccaccgggtttcctgatggtctgtcaggtgtatccttccttatcctcagtttcatcacccatagaatgtgactattaatactatcggcctagccaacttgggttgcaaggattaaaagaattaataggaataggctgggcgcggtggctcacgcctgtaatcccagcacagggaggccaaggcgggcagatcacctgaggtcaggagttcaagaccagcctggccaacatggtgaaatcctatctctactaaaaatacaaaaaattagctgggtgtggtggtgggtgcctataatcccagctactcgggaggctgaagcaggagaattactcgaacctaggaggcagaggtgcagtgagctgagattgcgccattgcactccaacctgggcgacaaagcaaaacttcatctcaaaaaaaaaaaaaaagaataggagtaaaatacttagaacagcactgctaggcataagcactcaataaatgttaactaatattagtatttgctgttaagtgtatttactaggtcagacaggtctaatttcaaatccaacctctcccacctactagatgtgtgtgaacttgggcaagttatttaacttctccatgctttgatttcccatctatgacaaaaagcaaaactaatagtcgtattattcccacagggtttttatagggagaaataggagccattttgatatgttagcctggtgcctggcacagggtaaacttccaatcaaggggaactgttcctatcatggagcctgtgagaggggccagtgcctggcgccagactgggacaagaggccggaggggacagaccttggaaagcaatgggctgcagaggctgatctgagagcagaatcaagaaacatgggattttctgagaaggcttgtcttaattttcttgtgtcagagccacaacaaagctccactgggtgatgtaaatgtatgggaacttgcaagctctgccagctgggcggctccatggttttttatgaggcaccatctccacaggtcctggccagcaggataggagcgcctgagtgtggtgatggaccctatgcccttggcatgcgggagagggggcccatctccatgacatggcctatgcagaaggggccctttatgtgcctttccactcagcaagccccacatctgctccctttggagaaagagatagattgtgagtgaggacagtgcagctgttgagccctgggctccacgctgccagcagggaagtttcccagatgaaataagaggtccagggcagtcctcaggaaagcgtggctcctctagtgtccagagagaacaaagtgcccggtaaaggctttctaaggactgatctcagaggccaaagggcttttgaactggaaagtggtgccaaagtcagtgcctgctgtacgttgcctctgcatgtctctgagtccttttgagaggccagcgggaagcgggtctcccattcaacaggagatgccctggtgaccatggatctgtgtgtatcctgcctgtttcccggagtgtcaggtctgccagctgatggccctggcaattttcccagggcaggtggtcctgacctggctgagcccacgcagatcaccagggacatggcttgactgcccctcccagcatgcttccgggggccagaagagctctaagaacggaccacaagagatcgggaccctcccttctctctgggatctagtcaactctaagaaagtacaaaccaagctgtttctgtctcgcagtccttagagaaagccacaggcttctgctttctcagaggaatcagggagcccaggccataaagacagcaagcaattctgaggcgctcactctgtgcaggcaatgccctgagcacttcccatgcataaactccctgcatcctcacagccgccctactgggcacccacattcttgtcgctatttaaacaagggcaaactgtgacacaaagggattaagtcactgtcctggggtcctgtgattaacaaatggcaacactaggatgtgaacacaggcatgtagctcccaagatccagcaagtgttcgcaggagatgcatccaccagtggaatgttctggaaggcactggtcccagactctgcgggagtcaagaggcccacttggcagacctgcaccaggcctccagtgtctgtccagtctctggaggtgcattttctccataagggaaacctgggaagcagcctgcagggctgttagtgggagctgttcaccacagctgtgtgttcattagccttcggcacttgctgcccggaggaccagctgtgcagcattcggatgccaggataggccacacatgcagtcccaggctttggtttgttttttaatctggatgtcctgataatgggggtaaaaaaaatagaaattgatttcatggagaatgacaactctttttcattttcaattagaaatgaaactatatgactaattcttactcagcactacttgataataatagtgtgttcattaagtggttgctgtatgctagctactgttctgagcgctttacataatcaacccctcttattctcaccctattcctataagaaagcaaccatcaacatccacattcacaaatcaggaaacgatggcaaagaggccgtgggactgcccagcatccatagctaggaagtggcagaggtgtgatttgaacccaggtagtttgatgccagaacctgcattctaagcactactctattagctgtgtggctttgatcttgaccttcctgagcctcactttcctctctgtgaaatgggaattgcacctgctctcagaggtgccctgagactgtggattctgtgcgccatggccctggcagagtgctgctgtcgtcaacaccagggacagcattccccagccattggagttgtatgctttaaccttcaaagaaagaaatgggaaagaaggctgggcatggtgtcaggcacctgtaaccccagctagctactctggaggctggggcaggagaatcgcttgaatccaggaggtggaggttgcagtgagccgagatctcgccactgcactccagcctgggtgaaaagggaaagaaaaccaacaagccaggctgattttctagagggatcagtgatgtggggtagaatgacaccttccctgtggcttgttatgcctccggttttgtttttgaatcttggttgctggtggggtattgccccctcggctcctctatgctttcgcgtgtgtgaaaatgcaggagtggaccactgtgcacagcaggaccatggctgtgagcagctgtgtctgaacacggaggattccttcgtctgccagtgctcagaaggcttcctcatcaacgaggacctcaagacctgctcccgtgagtccctccgcgctcctctcataggggaaggtttgcaccaggagtgaaacctatgtgactgcagagggcacaggttgtacttgggcacccctcccctgccccttgctctgctccaggagatagtgaggatgtccactgggactgcatgccttcgagggagggcggggtgagcatgacggtcacttgatccaatcactgtcgcccagaggtctcactgataaagggctgcctggcttttggttttgcaggggtggattactgcctgctgagtgaccatggttgtgaatactcctgtgtcaacatggacagatcctttgcctgtcagtgtcctgagggacacgtgctccgcagcgatgggaagacgtgtgcaagtaagtgtctgaaggacaagcaggacctgcacaggtgttccgtgggtgccggtgtgggtgcgctgccgacgtgtatatgtgcctgtgtgtcctgtctccaggctttgctgggcctgcatgaatgtgtgtgacagcatctcttagccattgagccttggtggctgcttcaccaactcccctcaatcttccttcccccgtgccctgaagtggctttttgctgtttccacctccctgtcattctgaagctggacagagcccttgtcctcagctctctctgctctacccccagccagctagtatggcacatgaataataataatgtggacccctcactgactgctagctgcatgctgggcactgtgctaagcacacatgctgttgcattcaggggacagatgaggaaaaactgtagctcagattaagtaaagagcctaaggtcaccagctagtgagtggtgggttcaaactctgctggctgtgattccaaagtcagtcctgggagaagaggatgctcctgagaaacgctttgccctgctttctgaccccggtgatctcacagcacatggtgaggctggcagtgatgtgtcctgggtacatatttccttgcagctggtcccaaatcttgtctcaattaaaaaaaaaaaaaattgctcccagacctccttctctcctttactgaagaatgctggtgtgtttgttgccctgaaatcctgtttcgaagtggaccaagataaagaatcgaaatatggtcattttgagagaaggaatcagaaatgaaagaaaaggaccaccatttatcttccccagcctgctggtctttctggttatagggccaagttccctgaccactggtataattgtaggcacaacctaatttatccactttttatatcatctattcatctaggcagatgagctggctgcacagctgggcgtgcctctctatgctgcctgtgagaaaatatttccagtttgggacagatccttggatcttagcaaatgggttatccatgttatagctttcggtggctccctgcccagctgcctcccagactgctgctgcagccagctcagggagggatcgggcacagggggtgcagaaagagggtgggtgtgttgaattgcatcgacattgacagcatgccaaagccagatgtaaggggtttgttggtttgtttaattctccatcattttagattattctgagaataagaggagtcattcttctgtccacctcgttcctgtaataatcaagaactgactacaagatggttgtaggaccctacgaaattctcatgagcccttctaaacaaatgcagctccatctcctttgaatcaggtgccccttcctctcccctgcccaggtccacatctggattttgacctgaccacttttaagtgttgcccattttctcatttaaagtgggtttctaaccaatggcacagtggaaccatctacatgagtaaatgtccaacaatgcaatgaatagtgaattttgttatttatatgtggttgtatctagatgagaacttgtgagatagtcagataagtgagaattgtcctcaggaaccgtataggagagatgcatttcacccaccagctgatacatatgcattgagctattcccctaattgaagactttctgcctgtcccagaatgattcattctgactgtcctgtcctgtaataatgggctaggttttcagcgtggccacagctaactgggggttgggatgtgtgttccccagctctactctcaatgacaaagggccagacgacatgactgcacctatttggtaaagccttttggggggcagtcaggcctggctcagcagataagagtgtccttggctctttatagaggcagcctccacttagagctttgatagcaagtggtcttaagaatgtgtcactcaccttctggaaagttctctgaagtgtggaggggttccaggggccctgggatgagatgggcactgctgtgcccctacctcttcaggcaccttgggttctctggcctctggagcgatgtcccctcccttcctccagccccctgaccgcaagctctgctttcccagattttccccagaggcctttttgcctcgggcagttagatgcacagactcagggtgtggggggtcggggaggggatggggcgatctcttttaccagctgcagctgagcagactccttccctctctagacgtttccctgagattgaccttgtgcaagggcatcccagcaccaagaaagactctataggcctgatgtgcatggaccacactgcccactggcctgcaagctgctggaggttggaggtcagaggccaacatgaaatgactgggagcgtgaatggacagaggccacctgtctttttgccccacggcccctggcacagggtccgctccccgcttgataaccttcagtggctctccactgtctcccagaataaatttccattgcactccttgatttggcagagtgcagaaccccctcttccacttctttagcctcaccccaggccctccctgaagccgcctcctgttctttagccaaagtggcaagtcccccattctctgaacaggcctggtgccttccagcccatcccaatgtcacccccatgggtaacctcctctcccacctgataggctctcctctcctcctcccaccccaggctctgctggggcctctctgcagagctctcctgcccagcctcaccctggggctctctgtgcacatgtctgagaaacagtgtggcagagcagaaagagtactgaactggaagcccaaagactgggtttaaatcgtgtcgcttctaccctaggcaagggaattggccctcttggggtctgactgctcatctctaaactgagaatggtcgttgctgcctttcaaggccactgtgtggttcagggagactgctgttgcagtgctatgtgaacttgtggactgccgtgacccctaaggaattcctcttcctctctcccctcccagcatcagaaccccctgcactgaggagactcagaaggtattgctgcctggaaacccatctgccagggccaggcctgctctccttggaggggccccagagacacacaactctggaagtgggctggactcaggagtccaagggctgtcctatgagggaccctcccttctgcaagcggaggacaccaacggggatcagagccgtcagcctagggcactgggggatctctgctggtgatactcccagtccaactaccacaggcagatctgcgagggcctgttaggctgcctgaggccctgagcttggccttccagggctgaggcaggcctaggcgaggctaggggagtgtcttagtctactcgggctcccatcacaaaataccatagactgaatgttgtttcttaaccacagaaatttctttctcacagttctggaggctggaagtccaggatccaggtgctggcatggctgggttctggtgagggccctcttcttggtttgcagacagccagcacccagctgtgtcctcatattgcatgggttgtagggggtgagagagcaaaagagtgcaggcaagttctctggtgtctcttcttataagaacactaatcctatcaggtcaggatcctgccctcacaaccccatctaaacctaattacctcccaaagactccacctctgaataccctcacatcagggttagggattcagatgtaaattttgggggaaacagtctgtagcagggagtagggggaggggaccaccctcactctcatgtattcacattacaggcttgatgcaacagaaggaaactagagattttcccttattttgtgggaaacggacacatggaggaaagtgatgcctccaagctggccctggtcggggagtcagtggcagagccaggaccagagccgagtcccctgattttaggatcttttgcccagtgtgagatgccctggaaaagcacatctcagttcagctgcttcttggtttgtctgagaaaaagcctatattaagttagcaaaggattggctgctgctagttttattacgagaaaagccaggaagcagtgtaattctatctgtcggcttctggttactgtcttggcagatggccactgtggctttctctctctggggttggggttggttttaacaacgtcttatgtggagccccagacgcaggattgctgtctgtcatcacggcagaggtgcaagtccacagaacacgttgccccactgttgctgcgccacagacttacgtgactcacctgtgtcagcgtgcagggctgctagacagggaccctaaagacccgtgctacatcctaaaacttctaatcatcctgagcacacgctgcagaatccattcacgatgagggtttaattaaacacataggcctgggtccttatgtgtaaaaggaggagaatccttctttgagaggaaaaatgttttctttctccctcttgagatttcttacatcctcccacctatttcacttaagtgatggctcctaatggagtctgtctttactctcctctctgggtttgaatctaggtacttccttaagcgcttggttcctttaccctcgttctctacaaatatttactgtgtacctgcattgtgcggggtgctggggatctctggggttgatgcagattcggtttgtgccctgacagtgtttaaagcttctcggggaagaaggatagcagagacagcgtccattccttatggtgagagtggtgatgtgagaaggatggagccgtgggagcaccccctagtctagagaaagagaagtttaatccaacacccagaggagggggctgtgggagcctcccctagtctagagaaagatgtttaatccgacacccagagagtgagtacagtgagccagccagagatggaggggaaatgcttcactaggggccagagagcgaactgcaggaagttctgtgctctgagtacggggtactgaatgcgagagggaggcggtgggtgagaaacgagcctggggacgccggcgggacacatcacccacctacagccttcagagacttcctggctggcctctcttgagaaaatgatttttgtctagtttgtcttctgagaatctgccaggctgcctcagcacactcccttaagctaggatgatctgtggatgtgcagctggaccagggacacggaggtctatttgaatatagtcccatctctgcccccaggacagctaagaccagtcacctctgaaggttcagggacattgggaaagtcacttcccctctgaccatcagttttctcatctttaatgaaggggttggactagttcatatccaatgagttgaacttccagcacccaaacaaggatattgcctggctcagataagtgctccgtaaacacttgctgaatgaatggacttactgtggtgcccaccatagtctcccaggctgaagacacccagtggtactgagtcaggggtggtggctctgtttgcctgttaggggaccactgaagcattttcctataggggagtatctttgccctgggtagaaactgactccaagttggtttccagacttggtggatagaaagctagcgcctatggtcaggaggttaactatcatccacctttggcattctctaatttcccatccacggttctttgaatttataagtggcccagaacatccctgaagggcagaaactggacattttgctgaacaaatgtgagtcgtgcattttgcaaggtgggtgtgtgggagagagtgggaagcctagctggccacaaacatccacacatcccatggggttcttatttaaaacatctgcacaaaacccctgtgaggtggatctaattaccctcaattttcagaatagcaaactgaggaaatgtttccttttgttcaacaggtctttcctagggatctgttaggtgccaggcattatggccactgccaacatctcacctctgatgattcgttgaaatcatctatggggctaggaaaaagtctaaaggcccaggcagcatcccagaaaccctgaatcagaaacagaaacagagactgtcttacattgttggtgagagtagagattgaaataatctctttggaggatgacttggaaatatttatctgcctttaagtattcataccctttacctaggcaattctgcttctggatgtgtaactttcaggtatgccttcacattgtacataaaactacatgcacaagaatatccattgcagataaggtgtggtggctcatgcctgtaatcccagcactttgggaggctgaagcgggaggatcacttgaggccagaaatttaagaccagcctgggcaacatagtgggaccccatctcaacaaaaaatatgaaaattagctaagcatggtggcatgcacctgtagtcccagctactcaggaggctaaggtgggaggatcacatgagcccaagagccaaggctgcagtgaactgcgatgacaccactgcactccagcctgggcgacagagcaagcctgtgtctcaaaaaaaagaaaaaaaagagccttagctgaagctaggaggacaggactgggcacaagggaagctccaggaaggaagggcttaggggtctgtctggattatggcttgacaaggttgacgtgaaagagctatagctattttattaccatggaaaatggagtagtagtagtattataaattcacggtagggggaaaaaaaaacacctcacctccatggccatccagttgtctatatcatggatcactcaactctactttccactcttacaccatgtgaggaactatcccaaaccatcaggaaatgttctgcattaatagtgagtctagaatttgctgagaaaagcaagtcatgctcagggcaaacaggagggtccaactcggctttgagcctcctctgcagctgtaattgcagttatcaaacttttcccattcttcaaagattttggcagtgcttctccccaaagaaattcccttcacatttgaaagcttgctgtagaatatagcaatgtagtatagtcagaaaatacggggatttatttataagattacaatttttgtctggttctttctcttgttaacaattggtcttgacaagccatcagccttcccaacccttagtttccctagctggtgagtgagaataacaacagctgccttaactaacccaaaggtggttctgaggagtcctctccagagagatactgcaaagatgctttaccaaaaaaagtgtgtggtttgtgcctgattataaaggtcattatgtgctttggggcctttatttaataattccgattcatgtccattttagaaattctactcaatctgaaaggattgagttaactttcagaaatatgtagggttcttataaaaagtcaccactcacctatcctcagtattaagcttttaaagtaacagcctggttttcacaggttcacaaaccttctagtcccccagaagccacccagccctgtaagatggcaatgccatccttcagttgctcagtccagcaacctgggagtcttccttgactcttctgtcctatccatatgggctctttgtattaatccatgaacaaattttatagattctaccttaaaatacagccagtctgaccacttctcaccagcctggtctgggccaccaagatctttgcacagggctgctcccaggtgtccaagctccattctgtgcagagcgatcctttaaaaacaaacccatatcatgccactccactgctcaaaacactgcagtgactgcccttctctttcagatctgacccccactgtgaaccccacatggtctgccccagccaaccttgctggcctcatcccctgccaggctcccggatgctccagtcacagtggtctccttgcctttcctgaaacacaccaaccaagcagctcccgttgctgcagtttgcaaatgctgttctttcttgctgataatgctctttcccagacaccaccactcacttcctgtctttctgcagggctctgctcagtgtcaccatatctgacacaccatataatataacaagccctccctactctccagcccagtagccactctccatccttctatcctgctcttcctccatagcactttttcccacatgacatatcacatatttgtctgttttccacgcatccctcttctcctgacacctgctgccaaatgtaagcttcacaaaagcagaaactttgtttcgttcattgctatatccccagagtctaaaacagtgcctggctcattgcagggactcacaaaatatttgtgaactgactgaatacatgaatgaattggttacctaagtgtaatatatacatacatacataagtagatatgtaaataagttgatattatagttacataatagccagttaggttaatcttattttctaatatttacaagtaatttatctctcattctgtaacttgtattctcatgttttttgttcatttttcttgtggagatgatttatattgtttgatttttatgtgccatgtgtatattaagaatttttgctcactttgggagtccgaggtgggtggattgcttgagcccaggaattcgagaccagcctgggcaacatggtgaaatcccgtctccacaaaaaattagcctggtgtggtggtgcacgcttgtagtcccagctatctgggaggctgagatgggaggatcacttgagcccgggaggcagaggctgcagtgagttgagatcacgccaccacactccagcctggatgacagagtgagaccctttctcaaaaaagaatttttgctcatagacatgctttatattctgaaatgtgtactgtaggataaggcactgttttaattcaaagtgtctgaaatgtcttttatgattgaataagccactaatatatgagtcattttcttcttctgtttctctaattcccatttgattctcagaattggactcttgtgctctgggggaccacggttgtgaacattcgtgtgtaagcagtgaagattcgtttgtgtgccagtgctttgaaggttatatactccgtgaagatggaaaaacctgcagaagtaagtttgtactggagctggctcctactactatgccagaccactgtgtgaaatcgctatccttatctctgtatatatcagttcctctcagaagtcaatgccacacagcaaaatgtaatgtagtgtcctggataggaccctgaaagagaaaatggacattagggaaaaaataagtaaatgtcaataaaatatagactttagttaataatcatgtatcagtatgggtttatcaataataacaaatggaccatactcatgtgagttgttaataatagggaaaactaggtgtggggtatattgcaattctttgcgctatcttctcaatttttgcgtaaatctaaaactgtcctaaataataaagtctattaaaaaaatggacaaacaaaaaaagtcaatgccagagctactactgaagttcttcacttatatgctctgtggcaagaaacagtggtttggcagtatactctagtggaaagatggacagtcagaaatccaagattcagtcaacctctgtctctgccatttattagctgggaaagttgcctaacttctctaagcctctctgcttatttatctttaataatgttgttgttgttatttctggtagcacaaatccctcccaaagggcaccttgtgatgaagccagttttgcctttcagaaggcaaagcctcttagatggggctgcagccagccagcccaggacaagcagccttagagtgaattgctggtgtaaatctcaagacacatctctgaataatcaaaggggagtgtgtgaccctggtttccatccatatcagttatctttttctcaacgtctcaaagcactttataaagagcaactcatgttgacacttttggaagaaaagatgggtaactggaataattactctctcattttttggacagcacagctaagactccaagaagttaagtgattctcctaagtcatacactatgttaggcacaaagccaaagttagatttcagtgctgctaatctaaattgaggtttaatctcctaaggaatcatatcaagtgtttccattctgatatcagaaactatgtctacagaaagttgatgatggactgcattttaacactaaagtagtgctggtgaacgatgatggtgaagacagtgaaacagtttgaagggttagcccgaattagagccgctaaactttgttctcaattgtaacttcctgccccatggaccactgagctcaggtggcagatagaatccagtagctgactccagtggatgggtcctccaaggtgaagtccatgtgaaatgtatgttgttgaaattgttgtaacttgctctcctgtcttcagggaaagatgtctgccaagctatagaccatggctgtgaacacatttgtgtgaacagtgacgactcatacacgtgcgagtgcttggagggattccggctcgctgaggatgggaaacgctgccgaagtaagtagcctcgaggtggagaagaacttttccctctgtggactcagacagttagagaagttcatttaatccttaaagtcctcctttattaccactgtcacaagtgtcagttcctgccttgggtgctctgaaagtgtttagctagagatcagttcagtagccccttgctttttcgggaatttctcagtcaaggcctgagttttgggttctttgcttctcttcattttctgccagccatcagccctttccacagtagctgtgtgggtgcccggaaactcgcacagtgctagtcactggactgaattagaacctctgccagcaatcactacaaggactgaaggttaattacagagctttctcctcttggcagaccgtaaaagtaagggcaaagggtgaaagggtgtattcgtccattttcacactgccgataaagacatacccgagactgggcaatttacaaaagaaagaggtttgatggactcacagttccacttggctggagaggcctcaaaatcatggcagaaggtgacgggcacatctcacatggtggcagacaagagaagagaacttgtgcagggaaaccccctttataaaaccatcagatcttgtggagacttattcacaatcagaatagcacaggaaagccccgtccccatgattcaattacctcccaccaggtgcctcccacaacacgtgggaattgtgggaactacaattcaagatgacatttgggtgggacacagccaaaccatatcagagggatttcctgtgggttttttctattatttttatcatttgcttctataggtcacccagaacaggctctgagagtttcgttagaaggtgtattccccagagttctccagagaaacagaccttctctatgtatatcttcatcttctattatatataaatataatagaagacatatatataatatatatatgtcttctatggtctgttctatcttctatttatatatatcatagaagatatatatatatatacacacacatatatatgtgtgtgatgtatatatgtatactatggtctgtttctatcttctattaatatatcatctccacaggaaaaatggacatacacacacacacacacaaacacacatatattgtgagggaggaaaagattggttgattttaagggattggctcacacaattgtcaggggctggcaagttctaaatctgtagggcagcctggagacccaggcaagagctgatgctgcagcccaagtctgaaggcagtctggatgcagaattcccttttcctctgaggacctcagtctttttctctttaggccttcaagtgattggatgaggcccatctacattatagagggtgatctgatctgcttcactcaaagtctactgattaaatgttaattgcatctaaaaattagctcacagcatcatttagactggtgtttgaccaaacaactgggcactatagcctagccaaagtgacacatcaaattaaccttcacagtacccaaaggaacagagggatgtcatacgagctcagtgaggtgggcattaggagagtacagagcagggatttttccccaccatgagattctgagctggtaattccctattttggggggaggggtggttgacaaagtctacttgcttttgtgacactttgccccagtgggcaaaataaccctttttcaattaagtcaaaataagttcagttgctttgaggttgatttttgggaatttcctcacagactcctttgagataactggggatattccacaagccaacaaggctgggttggagggatctcaatacctcgcttcttcctccaggaagagggactcctacctttagcaagaagttctgtgtgaatgactgacacctaggatgcctgtggtaccctggcctaactctgcagggattcccctcacaactgcaggtccagcttcacactgcagtggccctcttgtggagattttgtctataattctgcccattgtgcctgtctgcactgcttgttcatgcttttctttttgtttgtttttgttttgagacagggtctcactctgtcacccaggctggagtgcagtggcactatcttagctcactgtaatctccacctcctgggctcaagcgatcttcccacctcagcctcctgagtagctgggactacaagcgtgcaccaccacacccggttaatttttgtattttttgtagagacatggtttcaccatgttgcccaggctggtcttgaacacctgagctcaagaaatctgcctgcctcggcctcccaaagtgttgggattacaggtgtgaaccaccatgcccagccctcatgcttttctttctgcaaacatctgcacactcacacacacactgtttattcattcaacacatttattgctcagtaaattgaacacaaggtacaacttctacctctggaatttgatcctaaatcagatttcaccattcctgcttcctagagggatgtgttctcactgattccaattttgtgtgaagcctctccttttaaggggtaatgacaggaaagagccataggctctcatgctatggaggagcactcgggagacagctgtgtcatcaacctgccagatgaccgtgggcagcagtgaagctctctgagtatctaattcttcattgataccttgagaataattatccctgtcttccttgtctcacagggtgttgtgagggttaaagggctgtaagtacttcgaagagtttaaattacctcacacatgagaaatgttcattagacaatctgaactggagtgtttgggatgtctgtggcaaaagaaattagaagctaaagcacatctaataataggatagtaagtcaaggacacctaatcacccatcgtaccattcagactcatgggagctagagctttctgagaggagctttttccccatcctgagtatgagactgcaaaagacattatgaaggaggtttgaagagaggtgtgttttctttaaaagagattacttccacaatctctactcacatgactattcaattcacctcatttctacactgatgggattgttcaactccctacattttcctcagggaaggatgtctgcaaatcaacccaccatggctgcgaacacatttgtgttaataatgggaattcctacatctgcaaatgctcagagggatttgttctagctgaggacggaagacggtgcaagagtaagtgatctgaacttggctctctgctttaattttgttttggagcaactgctttttggagtattttcaggcaacaaatccctcacctctgcttctcccataaatataaatgcatatgcacaaatacagaatggggaagagagggcttaactgcagcacctgtgaaaacactttcggttttaattgacagtaaattcattatcagccaagaggctagggtgatcgtaggctgaacagcaatgtctgcatgagggaggtggagagagctgtgctctgctctgtgctggagaattacattcagttctgggcatggtactttaggaaaaaagagatggatcaacagtttaaacataaaaaaaaaaaaaacacaaaagagcaaaaggagtcttgagagaattattttttaatctgagagtagagaagatctttctaaacatgacatgaaatttaaaagccataaaagaaaaacaaaggaaaatatctagtaagagagtaaagctgtgatacctttttttaacctattagttaacctattagttaccagagatcaaaaagtttgattccttatgttggcaaaggtatattgtagtagggaattataaatggatcagtgagtgtctgaattggtataacctttcagagggcaatttggcaatgttatcaatccagttctagaagtttatcttacagatacgtgcatgtttacaaagccatgtatacaaggatattttatacagcactatttgtagcagcaaaaaactggaaacaagctaaatgatcacccatgagcctggctgaataaattaaggcacatctatgtaataaaacatgatgcagctgttaaaacaacaagcagctctggatgtatccccaagatattttaagagaaaaaagcatggtgctgaatgttttttatagtatgttaccatcgatatattttgtaaaacactctaacatacagtctctctttctctatatatgtgtgtgtgtgtgtaccattatatacatatctaatgtgtatacccttatgcacacacacacacacacacaatacacacaccctttttctaatatttaagttttgttccaaatgcatgtattattttttagaaaaaaataagataaacacgatttagaaagaattaagcagcatgatcttgtgaggaagttcagtattatgttaagcagaaaaaaattaggaaactggggatctttgtagaaaaaaattttgaggtaccaaataccaatgtgactgtcatctcactcatgatttgtatgatacccccaccccaccccaccctaccctggaaagaaaggacacttggagaagctacagcttagcacgaggacaaagaagctttctaccagggaagctgcatgcctaattagttcagagcataagcttcagctcagacagatctggatttgaaccctgattcatactacccgtgtgaccttggtcaaattatttaatctcggccgggcgctatggctaacgcctgtaatcccagcactttgggaggccaagacgggcagatcacctgagatcaggagttcgagaccagcctggccaacatgacaaaactctgtctctactaaaaatataaaaattagccaggcgtggtggcacgcatctataatcccagctactcaagaggctgaggcaggagaattgcttgaacctgggaggcggaggttgcagtgagctgagattgctccactgctctctagcctgggcaacagaggaagactccgtctcaaaataaataaataaataaaataaataaaatacaaaaattagccgggtgtggtggcatgcacctataatcccagctacttgagaggctgaggccaggagatggaagttgcagtgggccgagatcgtgccactgcactccagccagggtgacagagcaaggctctgtctcaaaaaaacaaataaacaaacaaaaattatataaactctttgagtcccagtttccccatctataaaataaggataataactcacaaagccatcacaaggaatacattagatcgtgtatccaaaggtgctgaacagccgggtgttgtggctcacacctgtaatcccagcaccttgggaagctgtggtgggaggattgcttgagctcaggagttcaagaccagcctgggcaacatggtgaaaccctgtctctacaaaaattagaaaaattagctggttgtggtggtacgtggctgtggtcccagctactagggaggctgaggtgggaggatcacctgagtgcaggaggttgaggctacagtgagttgtgattgtgccacttcactctagcctgggtgacacagcaagaccttgtctcaaaaaaaatttttttaataaaaaataaataaaggtgttgagcccagtgctcacacacactaagtgctcaaaaaatgatcactattacgattcacaatagtaaagacatggaatcaacccaaaatgcccatcaatgatagactggataaagaaaatgtgatacatatacaccatggaatactatgcggccataaaaagaaatgaggtcatgtcctttgcagggacatggatggaactggaagccattatcctcagcaaactaacacagaaacagaaaaccaaacactgcatgttctcagttataagtgggagctgaacaatgagaacacatggacacagggaggggaacaacacacaccggggcctgttgggggtagtcgggagtgagaacatcaagataaaaagctaatgcatgtggggcttaatacctaagtgatgggctgataggtgcggcaaaccaccatggcacacatttgcctatgtaacaaacctgcacgtcctgcagatgtatcctagagcttaaaataaaattaaatttaaaaaacaacagacaggccaggtgtggtggctcatgcctttaatcccggcaccttgagaggccgaagcgggcggatcacctgaggtcaggagttcaagaccagcctggccaacatggagaaaccctgtctctactaaaaatacaaaaagtgtccaggtatggtagcgtgtgcctgtggctctagctacttgggaggctgagacaggagaatcacttgaacccaggaggtggaggcagcagtgagccaagatcgcaccactgcactccagcctgggcgagagagcgagatgccatctcaaacaacaacaacaacaacaacaaacaaacaaaatgatcactattgtaatcatcaacagcagaggtgtccaaagatggggctttcgtggtaaggtgacaaattcctcatcaggagaggcattgaggcccaggccgaatggtcactgggtgaggatgctgtaaagaggatgtaagcaacagcagggctggagtagatgatctttaaagggcttatccatgcctgaagttctagaactttctgaaaattacgttctgaaagcaagtcacagctccattccagtcttatcaacttaactaccaaaaagaaaatgcccaagaaaagtgggaattaacctctggcaaaaaaatagtctaataagtggggctgtccttcctgtgtctgaaagcaaatacctgggccctgctctccctgatgcttttccactctaccttgttttgtgtttcctggagaagccttctggatgccattctatgtgtgggggttgcaagtgctagttttgttctgtaagaaaaatgtgtacagaaaggaggagaaaacagactcactgctggaaaattatttcagtatttttgaaatctgctgaagagccacatgcatgctgcctgagtctttttttggttcactcaggaacagactatgaatgtaaatgaagctttgagttggccttttcctctttcactaataaaagatcgataggttgagtgatgaggaaaagcacttaatggagaaacagaagaacccaatcccccaacatgtgcgcactcacgcacacacacacacacacaccacacacactatgacgttaagcattttatactggccaggcatagaaatggttttgcatgtgtgtgtctctacatgcttatattgttgtgcctcacttttaaagattagacagctgcttgatatataaaacagaatgtttatcacagattgtggattgtttgaaatgagatcatctggcccagcacggtggctcacgcctgtaatcccaacattttggaggccgaggtgggtggatcacaaggtcaggagttcgaaatcagcttggccaagatggtgaaaccccgtctctactaaaaatacaaaaattagccaggcatggtggcatgtgcctgtaatcccagctacttgggaggctgaggcaggagaatcgcttgaacctgggaggcagaagttgcagtaagccaagatcgcgccattgtactccagcctgggcgacacagcaagactctgtctcaaaaaagaagaagaaatgagataatccattttggatctgtccatttttcttttgcagtcctaaataacaaaaagcctctccacacccaaattgcttaacataaagcttttatttctgcttactatcgaccatctattaatagttgcctgagaccaggtacagtggctcatgcctgtaatcccagcactttggaaggccaaggcaggtgaatcgcctgaggtcaggagttcaagaccagcctagccaacatggcaaaaccccgtctctactaaaaatacaaaaaactagccaggcatggtagcgtgtgcctgtaatcccggctacttgggaggttgaggcaggagaatcacttgaacccaggaagtggaggttgcagtgagccaagatcacaccattgcacttcagcctgggtaacagagcaagactcaatctcaaaaaaaaaaaaaaaaaaaaaatgcctgaaaagcttccatgtaaagaatttatggtgataactttttttttaattttgttttttttttttttacggagagatgcagggtcttgctctgtcacccagactgaagtgcagcggcacaatcatagcttactgcaacctgtaattcttgggctccggtaatctttctgcctcagcctcccaagtagctagggctacaggcatgcactaccatgcccagctaatttttctttttttaagaaagacagtcactctgttacccagggtgttcttgaactcctgtgctcaagccatcctcctgcctcagcctcccaatgcactggggattataggcgtgagccactgcactaaggctaattattttgtaagctttaataggtcagtagggtacttacaggtgtgctacccaatgaacatcacctcattcacttagtctgtcaccacacatttactgaacactttttttgtgccaagtattggggggtggggcacaaaaatgaatgaaacacagtccctgctgaggaggaactcacagactggaggaggaaacacatcattaaataattattgtacaatgtggaacactatatagagtacattagattgtatgcagcttggtgttagggattgtgtcttggtcactattgcaatcctgctatgcccatggccttgtacaaagcaggtcctcaataaatttttggttgaataaattagtagtgtttggggtatatagaaagcaatacaagctgagttactaggaaggctccccagcagaggtgatggctgagctgaagaaatctctttctccattgactgtcagaatgccagcactagggtgatgtcaccctcctaaagttctaggagtcttttgggtattgttagacccttcagtgtactctacacccagctcctcccagacctgtcagtgttccagggtacaatgtagacttggtttcctagacaattgtatatctgccgttttgcttgtgaaaaatactatttttatcaatatgacaagccaaccataaaagtatacgtgaaaattattgttgcttgtggccctcccaacaactcatctatcctgtgtattatctaaagaacaaaactggttccccaaagtggttatgcctccaattgaagcatcattttattctactcttgtgcataaatgattttttattcaactatgtcaactttccttctgttcatatagaatgcactgaaggcccaattgacctggtctttgtgatcgatggatccaagagtcttggagaagagaattttgaggtcgtgaagcagtttgtcactggaattatagattccttgacaatttcccccaaagccgctcgagtggggctgctccagtattccacacaggtccacacagagttcactctgagaaacttcaactcagccaaagacatgaaaaaagccgtggcccacatgaaatacatgggaaagggctctatgactgggctggccctgaaacacatgtttgagagaagttttacccaaggagaaggggccaggcccctttccacaagggtgcccagagcagccattgtgttcaccgacggacgggctcaggatgacgtctccgagtgggccagtaaagccaaggccaatggtaatatggggtggaggtgcggtttacaccactcaaggttcaggtttcttaaactcactcagtggtctcagctggccataagggtaagcttctttgagtgtacagaaaggcctcctggcaactgccattatacatctttactaccctgccacctagaagccttaacaggaccccacaggagttaaataaagtgctcaggaaggagtctggctactagaagggtaggctaagctgaccacaggcgggtatcctctcactgtgatttactagccagtgtgtgatctccagtgtaagaatcgcctagatatacacaatagttccgaaacactggtcggcttgctctagaatcaactgaagactttgttaaattgtttctgatgggaacttttactgtgtatatttattcttgtattttttaaccaatacttcaagcgagcattctgaaaatgcaatagcccctagggtggataatactcttgtgtttccaggaggcaaagttagcttttccgaaaatcaaatgatggaacagattatgactctaagctcttgttgctcagtaaagcccagcctcttctctgaggttttcctgacctgagggttacttcagttgtacagatgtgaagcgtgctcgaggagtatgacccttggctaaaggaaacccaaaaggtaggataattggtagagacagtttatggtgaagtttctagattccttgagggagataagaaaacttgaggttgtgaactagtttgcttgaaaactgctttttttttttgagatggaggcttgctctgtcaccgaggctggagtgcagtggcgcgatgtcagctcactgcaagctccgcctcccaggttcacgctattctcctgcctcggcctcctgagtattgggtactacaggcgcccgccaccacgcccagctaatttttttgtatttttagtggagatggggtttcaccgtgttagccaggatggtctcgatctcctgacctcatgatccacccacctcagcctcccaaagtgctaggattataggcgtgagccactgtgcccagccgaaaactgccttcttaaagtacttgttgaggacacactgctttagcaagtcctgtaagaggaaataaggtatgcacagatcaaggcctcatctaagactttatggacccagtgcctagatcaggcctggcacacagtagatgtgtgacaactacttgctgagtgaatgaagaaagaagtgagagtactggcagtcccattggtgaactccattcctcctcacagaaaggctggttcacatcgacattcactcgctgtctttgtgaaggaggtcattttattgatactgcgtaccttcctctttttctagcccaagagtggtagccacaaagtgtcctgccctgaatcatctggatagattgtaaaactggctgttcacactagcctagattgctagagctcatgtcaaactcataggccccctagtctgcattcttaaaaagaattaattaggggaagcatcttagtctccagagacagtggttagccctttcatctcactgagactaatctaccttaccctttgctccactcaaatgtctctacacatcacacaaagacaggtggtagcagaaactgatgtttacttgattcttgaatcaacaagatttatatgaggtgacatcctcttatgaatttaactagtcttatgtatagcaaacagaatcttaaaatagtagttatcctttttaggaagtcgtgcataaaatcactgggctcccggacaaatatgctgaacttggttagtgaccttacacagactcagaacaaggcatcacaactcttgccccttgtcttgaagagccatttttaagtacatttttaagaatctagtctaataaattagctagaataagttatcagtgctgaaaaatgtttggactccagcagaacatattcttattgtgttttactttcaaatgaagagtatataggggaagggagtctaaggattgagtaagaaaagcttttaaagcaaacgcatatccctgttgaaatttaaggctgatcttgggtttgttctttttcctgactttaggggtttccaatggtctgtagattatccttttcagcttagcacttcctcacaaagttgtgtcatcttagcagaagtgggcaaaaagcagcttcacttggcctcaggtcacttacgtttcctaccctgtagctttgagtagaaactaggttattaggtcataaattgacttgattcttagaattcttccagaagagattcccatttagcaagccataaaatagggctcatttctatgaatccagaaggctaattcagggggaagttgcagatttgttaaatggcccagcccagggctgagcaacaggttagtagtttagttccccagcgtctcccagatgcctcacttctctcttggatccctcccttttgttcataggaccaaaataaaaatggtagaaaaataaaaaggaaggttggcatggactcttcaaatcataccacttaacatctaactggctttgggtgcagtacacacaacttccagcccctgggaacacaactctaactaacttgctcttaatttttcctgcaccctaggtatcactatgtatgctgttggggtaggaaaagccattgaggaggaactacaagagattgcctctgagcccacaaacaagcatctcttctatgccgaagacttcagcacaatggatgagataagtgaaaaactcaagaaaggcatctgtgaaggtactatagcttacgccgaagaccttagcaaacaaggcagcatgaactcctttttttttgttttttgagatggagtctcactctgtcatccaggctggagtgcagtggcacaatctcagctcactacaacctccgcctcctgggttcaagtgattctcatgcttcagcctcccgagaagctgggattacaggcacccaccaccacacccagctaatttttgtatttttagtagagatgaggtttcaccatgttggccaggctggtctcgaactcctgacctcaagtgatccagccaccacagcctcccaaagtgctgggattacaggcgtgagccaccgtgtccggccagcatgaacctttagtgataaattctcaaccaaaaaaaagtgtctccttcatgggcagggccagcaatgcctagaaacagtacaaaaagaagggctgggcaccatggttcccacctgtaacccaaccattttgggaggctgcggtgagaggattgctcgagcccaggagttcgagaccagtttaggcaacaaagtgaaaccctgtctctgaaaaaaaatttaacaattagctaggcatgatggcacacacctgtagtctcagctacttgggagactgagcggggaggatcgtttgagccctggaggtcacggcttcagtgagccatgattgcgccactgcactccaacctgggtgacaaagcaagaccctgtctcaaaaaaagaaaaaaaaaaggtgggggaaacaggggaggtgggaaagaaaaaagtaatagctaccattgtttgcgcccttgctctgtgccaagcagtataataagtgttttgacacaccagcatgcttcatcctcacaaacaccctagagaaatgatcatttaactaaaaatcaatcattatataaatcaggagagctgaagtgcaatttcagaatatacctataattggagtggaaaggggcgtacctagttcttccaagcccactgttaaaattaatgcctttctgcatggactacttgtttacagaatatcagactgccctttagacttcagattttgttatgcatgcttttctccagtttactaactgtgccagatatgcttacagatagcagttctgcctatttttccttgtactcatgtccccggctcaccagttagatcccagtctaagtgctgtgtcttacccctctagggaaagaactcttgagatgaggggtaacagggagggaaggcctttcagatttctgagtagagaatgttttgcctcttgattgtttcatgcaagttaaaatgcctcaagtggagctgctgccactgcaactaaaatccctcaacaacttcaccttttttttctgccctactttctagacatgacatttttgggagcattcttaagatgtacttagggggtccaagcttctcttacgagagagaattgccctagagtggtcataagtatcatggtaaccaactgcttttttgaatctttggtgttaccaaacaaaactaaaaaaccttaggttatggcaggtaggtaaggaggtggtctgggaccagcttcctgaagaacacacacatgcctgtggacaaccatcacttcttttggtcatctttttctgctcagctctagaagactccgatggaagacaggactctccagcaggggaactgccaaaaacggtccaacagccaacaggtacagtttttaaggcagtgtttttagaaattttggtggagggaaccatggtttccctccagataaaagctgtaaagaagtgaatgtaagtatgttcaaattatgataatgaaggccttttttccctcaaaaagatagttaacatttactcttacattaagccatatttggtaactagcatcgtttcaggtgacagtgtttttttgtttttgtttttgttgttgttgtttttttgagacagtttcattctgttgcccaggctggagtgcagtggtacgatttcagctcactgcaacctccacctcctgggctcaagtgattctcctgccccagcctcccgagtagctggaattacaggcacccaccaccatgcccagctaatttttgtatttttagtagagacggggttttaccatgttggccaggctggtcttgaactcctgacctcaagcgatccacccaccttggcctcccaaagtgctgggattacagacatgagccactgtgcccggctgtttttgtttttttttttgttgttgttgttttttgtttttttaataaagatgtttactccactgaagataacagtctttttgcttcagtatgtcccaaagtaaagctctgtaccaagtgctaggaataccaagtaccttactctgctgatggctgttttataaccaaaagcgttaagcaggtttgattgcagttttctttctctttacagaatctgagccagtcaccataaatatccaagacctactttcctgttctaattttgcagtgcaacacagatatctgtttgaagaagacaatcttttacggtctacacaaaagctttcccattcaacaaaaccttcaggtaattccaagtaaaatattactataagataacttgatctcagcctttcggcttgccaacaaccttagctttaaggaggaaaggaaagaaggaagtaggaaatagtatagaggaaaagagaagaaagaatttaagtaaaatgagaactaaaacataaactaaaagaaactcaagtagtgttcctcagtaatccacagtaagggccacttccagtgttggaagcatatacagtgctttcctggtatttactggatctggctgcatggaaaaagtggaacatgtctttcattatggtttcctccatatgctgattcattcctattattatgcgtctgggaagtctggtggattctagaggtgaacactttccatctgctttctcaggaagccctttggaagaaaaacacgatcaatgcaaatgtgaaaaccttataatgttccagaaccttgcaaacgaagaagtaagaaaattaacacagcgctatatccttttcttgcattatgcttctgtatggaatgcaaagaatattatcaaaacttcacacactctatgtaggttttatcaactgaagtaaatcccacgaagtcacaaagaacagtgatctccaggaaaggctttttgctttaaaaagcagcctcacaggtgtttgagaggcaagggcaagccaagcttattagcagcagtcaagcacttagttgccatcggctgttctcgggggcttagcaataaggcctgtcagtcagcatacaaagtaaggaaaaaagagacactggcctaactccgtctctgctaggaaggtgtgtaggacatgatgaggtctgaagtgcatcaaaggtacggtaagtatagacaaagaatgttgtagaatgaagaggtttcaaactcagtactccaaacttttcctttagccccaaggaacaccacagccacatatagattcagtgtgtttagtttctggaggacaggagtggttttttcttttttttcccttggcagcagagatcttctctatcggcactctaaaaaatgaaacactccaccaagggaacagcaggatccaatgattcatttaaacaatattaaataaaaggaatgcttggggataataaagaaaagaggattcggtgcttttacatattgaacaccctgccaagtgctctaaacttaaaattacagtaagcgtactaaagctggctgatatctcaagtgcatcaactagtctatagggaaatggcttaattctgaactatctctgtgccaatgggcttatgtaataaggaacaacagcatagggcaattccatttctgaaagctggaaatacgctcccttaagtaaaatgaaataatctttctgagtggttaattgacgaatatgggctctcattctgccctcaagagggcagatagagggtactgaggagcttacagggaagaccaatacctattctaatgcccttttcttctcgcttgcctgtcccaccccaaagttctactcacaagagactaaagaagacatatttttacataggtcagaattcctcaaaaccgtggccttatgtagcatcatggtgaaaactccgtatcgccctttgcttctgacttcatatcttactttccaaggccgaattctttcattgtcttctcttcaccagattcccaacattatcaattctggctcctagaagtgtgctatggcaaactaatttgcaagcattaagggtggaagtggaatcacaattaaaaaaaaaaaaaaaaagactgcagctgggtgctgtggctcacacctgtaatcctagcactttgggaggccgaggtggccttgcttgagcttaggagttcgagatcagcctgggcaacatactgaggccttgtctcttaaaaaataataaataaaataaggccgggcacggtggctcacgtctgtaatcccagcactttgggaggccgaggcaggcagatcacctgaggtggggagttcgagaccagcctggccaacatggagaaaccccacctctactaaaaatacaaaattagctgggcgtggtggcgcatgcctgtaatcccagctactcgggaggctgaggcaggagaatcgcttgaacccaggaggcggaggttgcagtgagccaagatcgcgccattgcactccaacctgggcaacaagagcgaaactctgtctcaaaaaaagagaaaaaaaacaaaaataaataaaattaaaattaaaaagacaaattcacactgagccatctggctttgctgatgttaaaaaaaaaaaaacccaaaatatttgtcttgacagaatatgttaaatgagttctacaaatttacaagtcagggttttaacatacttgacagaaatgggaaaaaaaaccaaaaccttttagatttcagaagccaaaattttacgtggataaatcaagttatatttaaatgtaaataaaaatagacaattcttcatcttccttaatttgagatttactagaagaaatgacacagagaatggaagccctggaaaatcgcctgagatacagatgaagattagaaatcgcgacacatttgtagtcattgtatcacggattacaatgaacgcagtgcagagccccaaagctcaggctattgttaaatcaataatgttgtgaagtaaaacaatcagtactgagaaacctggtttgccacagaacaaagacaagaagtatacactaacttgtataaatttatctaggaaaaaaatccttcagaattctaagatgaatttaccaggtgagaatgaataagctatgcaaggtattttgtaatatactgtggacacaacttgcttctgcctcatcctgccttagtgtgcaatctcatttgactatacgataaagtttgcacagtcttacttctgtagaacactggccataggaaatgctgtttttttgtattggactttaccttgatatatgtatatggatgtatgcataaaatcataggacatatgtacttgtggaacaagttggattttttatacaatattaaaattcaccacttcagagaatggtattcagtgcaaaaattcttagtttaactttaaatggaagatatgtatgtatgagaaatggccaacatgcctatgaaaaaaatgctgaatctcatcagtaatcaggaaaatgcaggttaaaacaataccatttttcacccatcagcttagcaaaaatgagtatattttttaacaagtgttggtaaggatgtggaaatgtgaggttcttgtagtaagaatgcaaatggcactctttgtagagtaagtctgttgacatctcataaaactgaaaatgcacacaaccctgtaaatctagcaactgcactcagttgatttcagcccatacatacaaagagacctgcataagaatgttactaggctttgtaaaagcaaaaaataaggaacaacttaaacatcatcagaaggggaactgataaactctggtgtaatccataccacagaaatacaacaccgcatgtacaggaatgtgctacatctatacaaataaatggtcaaactcaaaacaaagatgactttaaaaagaatgacaaaatgtttagcataccattcctgaaaattaaaaaaacaaaataaaaaatgtcacggtgaaaccccgtctctactaaaaatacaaaaaattagccgggtgtggtagtgggtgcctgtagtcccagttactcaggaggttgaggcaggagaatggcatgaacccgggaggcggagcttgcagtgagccaagatcgggccactgcactccagcctggggacagagcgagactccgtctcaaaaaaaaaaatgaaaagaaaaacctagatgggtaccccactacacaccgaggctgtttgttatataccccattgctcctagactacaaacctgtacatcatgttactgaatacggtagacaactgtaaaacaatggtaagtgttgtatctaaacacagaaaaggaatttttcagccttattataatcttatgggatcactgttgtatatgcagtccatcactgaccaaacgtcattctgaggtgcatgactatcagttctggcattgctgccaaggtggctcaattctactttactctctgttgtgttcaggctccacctagcggcacaaaagtctgcctcctcctttttagcaattaaatacctttcaacctaacattttatctctctgccatgagactatgtatatgtatatatatatatatatatatatatattttagctattaaacacatttctcctgggggaagaaaaacctcatggcaaaaaaaaaaagcctccaaccaatgcattaaaatctacagattaatccaagatatttaacttgaagattgtctaaaatattatttctctattttgcttgtttttgccacttgtaaatctcagagttctgcattccattttcatcacttattggatttaatctgcaaaataaggctaataataatattgagtggtcagaggattaaatgagttaacatatacactattttgtaaggtacctaaaacttttattatttattttttgagatggagtctcgctctttcacccaggctagagtgcagtggcatgaccttggctcactgcaacctccgcctcctgggttcaagcaattctcctgcctcagcctccgactagctgggattacaggcaactgccaccatgcctggctaacttttgcatttttagtagaggaggggcttcaccatgtggccaggctggtcttgaactcctgacctcaggtgatcagtcagcctcagcctcccaaagggctggcgtgagccaacacacccgaccatattatttatttttagagacagggtcttgctctgtcatccaggctagagtgcagtggcaccacgatagctcactgtaacctcaacctcttgggttcaagcaatcctcctgcctcagccacctgagtagctggcaccataggcctgtgccaccacaatgggctaatgtttttaactttttttgtagagatggggtctcattacgttgcccaggctggtctcaaactcctggccttaagtgatcctcctgcctcagcctccagaagtgctgagattacaggcataaaccacagtgctggaccctaaaacattttaaatgctcagtattaactattatatttttagtctttagcagccaagagtattggacacaaagatggtgctgagctaagtgtatgttgagtaaatgaaaagacagaataaattctttgctgacctgagaaaagtaatctggtagattcccacccctaaactatcttttgaagcaaacaggcagtagtaaattaaataatggtaaatgcataagaaatttaagaactactattaacaaaattctgaactagaaagtcccaagtgtatcaataagagaattaagtaaatgtttaagccctagtagtcattatccactctaatttttgataagtgacacgaagttgaataccttgagtccctgtcctgtagcaccttagagagaggtaatcaatgccataaaaaaaggtactaaggtaactcagaagcacctgttttagactgggtgctaggcttaccctcagaacaagcacaggtaagcccagaaaagggaggagtgggggaaggaaaccagattccactgcaggtgaagggagcagcaagtctaaggagtagttggtagttggaagacaggggatggaaaacttttccatgacacagattataatattatcttccagacgacccaactattaatagttatattcataatcagcctaaaagttggtttcttctctacattccttttgttcctgccaccatcccataccaaccgcaattcttaacacactctacaatatccaacctcttctttgagatttctatttccatatctaagagttcagtagaggtatggtatggagtaaatccaattggctgcaatttcctacaatcccctgaatattagagctacccacacactgctttcattataatcagaaaagaacattttaaatgtcaccttacactttcccagatcttcctggccagtgtcactttctctctgacagcggtttaagagcacttaatcaaaggtaacataggccagaatgagtaaggaatgtttcctgtctactagctttaaacttcttgtctctctgaactttcttgctgaaagaaagaatcgttgtgactgcacaaaaagaacatataatgaaaaggcaaaaaccaaatgtagcatattatcaactacatagacagccctagaaatcataaattttctaaaaaaccatcattccaaaatgcctgcagccaaaaaaccacaacagaaaccatgcaaagaaagggtacaccaacatctgcaatattgtattctttaggtcaccaccccctgagaaattaaactcgagctagtcaacctggaggaaaaactaacccaaatagtgtgaaaagtcactatttgggacttgtgggaaaaactgagcaagtagataagcacgcaaactaccttaaccatgagattgaaacattttgaactatgggaacaaactaacaaacactattagagaccagtagtcagaccaagtaattcttatcaaagattcaaatattttatatcactttggccacacgggtctctggatatgtaaacatgaacaccttagaacacttaaaatctttcatatattcagtgactcttaaccaggagagaagctagtttaaaaatgtggtgacatttgggggtgattacaatgacatggaaggaaaaccaagaatgaaaaatacctgcagaatccacagccctccacaacaaagaactgtcccattacacaatgtcagtagtgctcccaaattgagaaatactgagtaaatgaactggtaaaaccattaaaaaccagactctccaaagtattaatatatccacaacctcagattaacttcggacacaaactaaaatcatgagctattcccttgaaaaaaactcctaacccccgactatcaaattgggaacatgacccacccagggctgttatatagctattaagagctggggtcctctgactccaagtgcagtaaatgcttgattttctgcatactatttagaaggcatcctcatttactgtctcactcatctaccatcaaaacttgcctgaaagaggggagggagaaaaggagcaaggagattgagtctaaaatccaaaagacattgtcttttctgacacttctgtggcctccctccctcaaagcccagctgactacatagggcataccttactagcaccattcaactctgtaaattagtatctaactaaatcattatttcccctcaaattaattctttcgaatgttccaaaagatattaacatatgaaggattccctgggacatactcttgggggatgcagtatagtttccaaaaatgtgaatacttaacgtacttcacagtacatcttttaggtgtatgatataaaacatactcgggcaaacatggacttaactattgatgatctgggattactcagaaatcgtccaagtgcaccaaccacttaacttaggaaagattattcattaaagtaaaacttttcttaacctatgacagcattttggatggggaaacatttcagttaatcttttttagctactcaaatttggtaaattgcaattctgggtatttaaccttgttacctcctaagcatactagaatataaaatgcaaacaatgtcctgagaatggaattacaaaacttgagctttctaaacatctagtactagaaaggaacccagtgcagtccctttacaaaaactgggccaggagcagtggctcacgcctgtaatcccagcactttcagaggctgaggccgggggatcacgaggtcaggagatcgtgaccatcctggccaacatggtgaaactccgtctctactaaaaatacaaaaaaaaaaaaaaaaattagccaggcgtggtggtgcgcacctgtagtccctgttactcaggagactgaggcaggagaatcgcttgaacctgggaggcggaggctacagtgagccaagattgcaccactgcactccaagctgggcgacagagcaagactgtctccaaaaaaaaagaacaacaacaaaaaaaccctggaaaacagaaatcaggatgtgtaactttttttttttttttttgagatggagtcttgctctgtcgcccaggctggagtgcagtggcacgatctcggctcattgcaagctctgtagctgggactgcaggaacccgccaccacgcccggctaattttttttgtacttttagtagagatggggtttcactgcgttagccaggatggtctcgatcttccgacctcatgatccgcccgcctcggcctcccaaagggctggaattacaggcgtgagccaccacgcccggcccaggatgtgtaactctttactgaaaagtcttgccaccacatctgcctcatcctctctaatccaaccttcaggaaattgtattgaaacaaaaatagagaaaaatactgaaatagatacaatgtttttaaaacaagcaaattttattaaaggaaaattttgcaggtttaaggtttgcaggtgaaattttgtaggtgaaaaggtttacttttcaccagtctgttctggcatgcttctaatgatgtcagagtcacctaaaaaataaaaataaaaaaacagtaattttacaattcatttaatagcaactggtaccataaaatttctctacctttggttatcccttctgtagacaatggtctgcaaattagcactgactttttgcaaaagttatcacattagctgtactgtcatttttcttaaggttgaccaaagataacctagaatcacagccattatataatcacataaaatgatcatataataaaattggtttatcaccagcatttataaaaccagacctagggaaagaactaggtttggggacacatgcatggtcttaatatagcgaatgtttagcctgtcctgactattacaaaatcagaacagcgagaatattcgcagtattctatgaatcaaagattcacaattggaaaacagaatgatgtagattttttggcacttttttttttctcaagctaattttacatgtctgttctcaagaagcaagaattactttcttctgttttgccagattattctctccttataatttcaccttttaccaaatctatgtcattatttcataggtacttcatcaaatgaaattcattatctgacagtaaaaattttaacttataataaagccaattataatgtattggcattcattaccaattctctacaaaatacaactacacgatatgccttgctagatccatattctatctgaatttaggaaccaaagacatttgtgtagtaagaaatacttgtccagacattacattagaaaggcaaaaaaaaaaaaaaaagactttatgatttaaaaagcatacctggatcaatgatagccagtgtgcacactctgtagtattttccgcatgctgtgcccagttcaatattattgccactgtagtgatggacaccagttttagccaacatagcatagtactctatttcagatttcctttgggaaccaaaatgggcaaataaataaatgcgataccaagtgactgacagactaaatgttactacttcttttactagtgttaatgttgttaaggccttcaaaaagtaacaaaatcacatattactcttaaaaacatcatattcattatccaatacaaaccaacatttgtatgtatcccttgcaagtgaaggggcaaccagcaaatatctaatcaacccctactatgtttaagacagtatcaatactcacggaagagggtaagatgcaaataaaagaaagcaaagcattatctagcattagtaaggaccacatactttatatttccatgacaatctctaaagtaggtattatgtacttttttttttgagatggaatctcattctgtcgctcaggcggatcgtgcagtggcacgatctcagctcactgcaacttccacctcccgagttcaagtgattctcctgcctcagcctctcaagtagctgggattacaggcgtgcaccaccacacccagctaattttttatatttttggtagatggggtttcaccatgttggccaggctggtctcgaactcctgacctcaagggatccgcccgcctcagcctcccaaagtgctgggattacaggtgtgagccacggcacacagccctattctttttttttttttttttttttaatctaatgaaactgagccacagaatagtaagtggaggatccagaatctaaacctttaaaagataagccatttctatcaccatcccctcagtgcccagaattccagatgggaagtgataccgttttagagttaaaatttctggcctcacgcgtgtaatcccagcactttgggaggccggatcacttgaagtcaggagcgtcagaccagcctggccaacatggtgaaaccttgtctctactaaaaatacaaaatttcagcgtcaatttagtagatactaatggttttaggaatcggaaaggagtcctatactatcttgccactcaattatgtgaatccacataccagcaatagtgctacaatgtattagttaaaaaagcacctcaagccgggcacggtagctcacacctgtaatctcagcagtttgggaggccgaggtgggtggatcacctaaggtcaggagtccgagaccagcctggccagcatggcgaaaccccatctctactaaaaatacaaaaattagccaggcatggtggcaggtgcctgtaatcccatctactcgggagggtgaggcagaattgcttgaacctgggaggcagaggttgcagtgagcttagattgtgccattgcactccagccggggtgacaagagcaaaactctgtcttaaaaaaaataaaataataaatggcacctcgggccccatcccagatccaatgaaatcagaacttgcattttaacatcacccatgtgactcctttgcacagtcatgtttcagaagcactactatagaagacaggctttaaagaaagtttcaaagaatggttagggaaaagccgaacccatgggacaagacagaaagggccctccaggctttgacggtaactacagacaccctatataaaatgctgtaagcagcttatgcatcaccacagaaaatttgctcacatagcttatactctgcaaggtccaagtttgtttggcttatttacaacaccccctaagttcaatttcaaaacagtgagtcaagcataaatcttgactcagaactgatttagcgggctaaactaggtgattctatgatagcctgcaactccatagcccagcctcaacttttcttacctagttttttgacactaaaacaagttcacacaatgaagcatcattaaagcacctcaaagctaaaagaaccaaaaaagcaggacacaaaatacatggaaaaaacagtaatgtgtctgtgtttccattaaacctcgatgttctgttttcactcctgccacacacacacatttctcctccaaaaataagctcacagaaggggagcacacgatttgggggtgggtcggggagacgggaatgaagggccaaacaccacaatcgctaccgtaattatcctgcaagtgttcgagttcatggtactcagattacaagtttacactcctgtatattcgttcacgatgaattcgcggtaggcgaagcccgttcagtctcttcgattacctcaaagctgggcagttgttagcgagaatgaccaatttcgctttgccttgtctgatcatcttcagagtctgcttgtaccccaggacgtacttcccacttttcataacgagttggagcctagagttgatcgactccagcgactttttctacaaagcaaacattaaatacggacctaagggcctcgcctgcaaccgcctcaaaaccggacccagctttttgaagccgagccccttaaacttccgaagtcgaggaccccaagtcattgagagggccactgggattccttctggggccctccaaatgccagcaggcatgctgtcacccccgtgggctcacatctgcccgccctggccaagacatctctccacgtgaatcgtcttccgggcctggcccgcctcactcaccgtcttctttgcggccaccatcttcctgccttaggagcgggacggcccccaacctagaagagacagagaacaggacaggaattttaggatccggagttacaaatggcaacccgcaaagctccccgcgctgcctaaacctcggtcggtaggagcccactcaccaacagcagccgctaagatggccggggaacgagaaaggaaagacttcccacaatgcaaagctcttcacggcagagccggaactgcgggaccggaagcggaaacagatcgcaagcagaaggggcggagcaaaagcggagggcagctgccggttgctattggtaccgctagctagaatggctgcgggggccgtacgcggctgctcatacctttaatcccagcactttcggaggttgaggcgggaagatctgttgcgtccagctcaaggccagcctggacaacatagaccacccctgtctctacaaaaaaataaaaaagaaataaaaaagaaattagccgggcgtggtggcgcgctccagtagtcctagctactcccagctacgccggaggctgaggcggagaggtcgcttgagctcggtaggtcgaggctgcagtgagccatgatcgcgccactgcactcagcctgggcgacagagtgagactctgtctcaaagaaggaaaaaaaagaatgacggcgggggtgttcttttccccctctgcgggcctttaagcttcgcggcgttgtgttgctgttctgctgcgagctgcggtctaactaatcgaggcgcttagaacccggagggagttcgaaaagccgactgaaggtgaggtgggagggtagatgagaagaggctgcggcggctgcgaccacggtctcaatgccgctgaattcatctttgtcctgaggcgcggctcttggagagccttgtgggtgactccgatgcgccgcagcacccgcatttactctccgcttggtagaagcagctgtgtcctcacccctgcggtcacccaagttacctgtcccctggagaacggtggcgccctgctcgagtttcccaaaactcgccttttgtgactgtgttagcgtgaacttgtgagccgagtttgcactgagagcgcgataaacaggtctaattttttaaaagtatttttgctgttaacgttggatcttggtataaatgtccagagacagaccactgaagatattaggcgctgaaaatccccacctaatcaatcagaccagtggataagctatatgagggaaacctcttcccctccttaattaagcctcaccaaaaaacgcgtgctgtaccaggaatca

SEQ ID NO: 1256 - DNA, 4340 bp, Homo sapiens
ggcccctaaagctgcctgtgttccgtgcctgcggctccggacccctggagtctgatgcccgcctgggctcaggcacggacggagtggagccaggtggcagcaggcagggcgcgccgccagagtgcccagctcccggggctgcccacagggtggggccgccctcgccgccgctccctctccgcgccttccccatccccaaagaggacacccctccttccgcccggcccgctccccacccccgccgcggcaccgcctccccagccgcccgcccttgcccagcgcctcccaggcagccagcgagcgaagggagcgctctgggatgggacttggagcaagcggcggcggcggagacagaggcagaggcagaagctggggctccgtcctcgcctcccacgagcgatccccgaggagagccgcggccctcggcgaggcgaagaggccgacgaggaagacccgggtggctgcgcccctgcctcgcttcccaggcgccggcggctgcagccttgcccctcttgctcgccttgaaaatggaaaagatgctcgcaggctgctttctgctgatcctcggacagatcgtcctcctccctgccgaggccagggagcggtcacgtgggaggtccatctctaggggcagacacgctcggacccacccgcagacggcccttctggagagttcctgtgagaacaagcgggcagacctggttttcatcattgacagctctcgcagtgtcaacacccatgactatgcaaaggtcaaggagttcatcgtggacatcttgcaattcttggacattggtcctgatgtcacccgagtgggcctgctccaatatggcagcactgtcaagaatgagttctccctcaagaccttcaagaggaagtccgaggtggagcgtgctgtcaagaggatgcggcatctgtccacgggcaccatgaccgggctggccatccagtatgccctgaacatcgcattctcagaagcagagggggcccggcccctgagggagaatgtgccacgggtcataatgatcgtgacagatgggagacctcaggactccgtggccgaggtggctgctaaggcacgggacacgggcatcctaatctttgccattggtgtgggccaggtagacttcaacaccttgaagtccattgggagtgagccccatgaggaccatgtcttccttgtggccaatttcagccagattgagacgctgacctccgtgttccagaagaagttgtgcacggcccacatgtgcagcaccctggagcataactgtgcccacttctgcatcaacatccctggctcatacgtctgcaggtgcaaacaaggctacattctcaactcggatcagacgacttgcagaatccaggatctgtgtgccatggaggaccacaactgtgagcagctctgtgtgaatgtgccgggctccttcgtctgccagtgctacagtggctacgccctggctgaggatgggaagaggtgtgtggctgtggactactgtgcctcagaaaaccacggatgtgaacatgagtgtgtaaatgctgatggctcctacctttgccagtgccatgaaggatttgctcttaacccagataaaaaaacgtgcacaaagatagactactgtgcctcatctaatcacggatgtcagcacgagtgtgttaacacagatgattcctattcctgccactgcctgaaaggctttaccctgaatccagataagaaaacctgcagaaggatcaactactgtgcactgaacaaaccgggctgtgagcatgagtgcgtcaacatggaggagagctactactgccgctgccaccgtggctacactctggaccccaatggcaaaacctgcagccgagtggaccactgtgcacagcaggaccatggctgtgagcagctgtgtctgaacacggaggattccttcgtctgccagtgctcagaaggcttcctcatcaacgaggacctcaagacctgctcccgggtggattactgcctgctgagtgaccatggttgtgaatactcctgtgtcaacatggacagatcctttgcctgtcagtgtcctgagggacacgtgctccgcagcgatgggaagacgtgtgcaaaattggactcttgtgctctgggggaccacggttgtgaacattcgtgtgtaagcagtgaagattcgtttgtgtgccagtgctttgaaggttatatactccgtgaagatggaaaaacctgcagaaggaaagatgtctgccaagctatagaccatggctgtgaacacatttgtgtgaacagtgacgactcatacacgtgcgagtgcttggagggattccggctcgctgaggatgggaaacgctgccgaaggaaggatgtctgcaaatcaacccaccatggctgcgaacacatttgtgttaataatgggaattcctacatctgcaaatgctcagagggatttgttctagctgaggacggaagacggtgcaagaaatgcactgaaggcccaattgacctggtctttgtgatcgatggatccaagagtcttggagaagagaattttgaggtcgtgaagcagtttgtcactggaattatagattccttgacaatttcccccaaagccgctcgagtggggctgctccagtattccacacaggtccacacagagttcactctgagaaacttcaactcagccaaagacatgaaaaaagccgtggcccacatgaaatacatgggaaagggctctatgactgggctggccctgaaacacatgtttgagagaagttttacccaaggagaaggggccaggcccctttccacaagggtgcccagagcagccattgtgttcaccgacggacgggctcaggatgacgtctccgagtgggccagtaaagccaaggccaatggtatcactatgtatgctgttggggtaggaaaagccattgaggaggaactacaagagattgcctctgagcccacaaacaagcatctcttctatgccgaagacttcagcacaatggatgagataagtgaaaaactcaagaaaggcatctgtgaagctctagaagactccgatggaagacaggactctccagcaggggaactgccaaaaacggtccaacagccaacagaatctgagccagtcaccataaatatccaagacctactttcctgttctaattttgcagtgcaacacagatatctgtttgaagaagacaatcttttacggtctacacaaaagctttcccattcaacaaaaccttcaggaagccctttggaagaaaaacacgatcaatgcaaatgtgaaaaccttataatgttccagaaccttgcaaacgaagaagtaagaaaattaacacagcgctataagaaatgacacagagaatggaagccctggaaaatcgcctgagatacagatgaagattagaaatcgcgacacatttgtagtcattgtatcacggattacaatgaacgcagtgcagagccccaaagctcaggctattgttaaatcaataatgttgtgaagtaaaacaatcagtactgagaaacctggtttgccacagaacaaagacaagaagtatacactaacttgtataaatttatctaggaaaaaaatccttcagaattctaagatgaatttaccaggtgagaatgaataagctatgcaaggtattttgtaatatactgtggacacaacttgcttctgcctcatcctgccttagtgtgcaatctcatttgactatacgataaagtttgcacagtcttacttctgtagaacactggccataggaaatgctgtttttttgtattggactttaccttgatatatgtatatggatgtatgcataaaatcataggacatatgtacttgtggaacaagttggattttttatacaatattaaaattcaccacttcagagaatggtattcagtgcaaaaattcttagtttaactttaaatggaagatatgtatgtatgagaaatggccaacatgcctatgaaaaaaatgctgaatctcatcagtaatcaggaaaatgcaggttaaaacaataccatttttcacccatcagcttagcaaaaatgagtatattttttaacaagtgttggtaaggatgtggaaatgtgaggttcttgtagtaagaatgcaaatggcactctttgtagagtaagtctgttgacatctcataaaactgaaaatgcacacaaccctgtaaatctagcaactgcactcagttgatttcagcccatacatacaaagagacctgcataagaatgttactaggctttgtaaaagcaaaaaataaggaacaacttaaacatcatcagaaggggaactgataaactctggtgtaatccataccac

SEQ ID NO: 1257 - protein, 935 aa, Homo sapiens
MEKMLAGCFLLILGQIVLLPAEARERSRGRSISRGRHARTHPQTALLESSCENKRADLVFIIDSSRSVNTHDYAKVKEFIVDILQFLDIGPDVTRVGLLQYGSTVKNEFSLKTFKRKSEVERAVKRMRHLSTGTMTGLAIQYALNIAFSEAEGARPLRENVPRVIMIVTDGRPQDSVAEVAAKARDTGILIFAIGVGQVDFNTLKSIGSEFDHVFLVANFSQIETLTSVFQKKLCTAHMCSTLEHNCAHFCINIPGSYVCRCKQGYILNSDQTTCRIQDLCAMEDHNCEQLCVNVPGSFVCQCGYAEDGKRCVAVDYCASENHGCEHECVNADGSYLCQCHEGFALNPDKKTCTKIDYCASSNHGCQHECVNTDDSYSCHCLKGFTLNPDKKTCRRINYCALNKPGCEHECVNMEESYYCRCHRGYTLDPNGKTCSRVDHCAQQDHGCEQLCLNTEDSFVCQCSEGFLINEDLKTCSRVDYCLLSDHGCEYSCVNMDRSFACQCPEGHVLRSDGKTCAKLDSCALGDHGCEHSCVSSEDSFVCQCFEGYILREDGKTCRRKDVCQAIDHGCEHICVNSDDSYTCECLEGFRLAEDGKRCRRKDVCKSTHHGCEHICVNNGNSYICKCSEGFVLAEDGRRCKKCTEGPIDLVFVIDGSKSLGEENFEVVKQFVTGIIDSLTISPKAARVGLLQYSTQVHTEFTLRNFNSAKDMKKAVAHMKYMGKGSMTGLALKHMFERSFTQGEGARPLSTRVPRAAIVFTDGRAQDDVSEWASKAKANGITMYAVGVGKAIEEELQEIASEPTNKHLFYAEDFSTMDEISEKLKKGICEALEDSDGRQDSPAGELPKTVQQPTESEPVTINIQDLLSCSNFAVQHRYLFEEDNLLRSTQKLSHSTKPSGSPLEEKHDQCKCENLIMFQNLANEEVRKLTQRYKK

SEQ ID NO: 1258 - DNA, 4283 bp, Homo sapiens
ggcccctaaagctgcctgtgttccgtgcctgcggctccggacccctggagtctgatgcccgcctgggctcaggcacggacggagtggagccaggtggcagcaggcagggcgcgccgccagagtgcccagctcccggggctgcccacagggtggggccgccctcgccgccgctccctctccgcgccttccccatccccaaagaggacacccctccttccgcccggcccgctccccacccccgccgcggcaccgcctccccagccgcccgcccttgcccagcgcctcccaggcagccagcgagcgaagggagcgctctgggatgggacttggagcaagcggcggcggcggagacagaggcagaggcagaagctggggctccgtcctcgcctcccacgagcgatccccgaggagagccgcggccctcggcgaggcgaagaggccgacgaggaagacccgggtggctgcgcccctgcctcgcttcccaggcgccggcggctgcagccttgcccctcttgctcgccttgaaaatggaaaagatgctcgcaggctgctttctgctgatcctcggacagatcgtcctcctccctgccgaggccagggagcggtcacgtgggaggtccatctctaggggcagacacgctcggacccacccgcagacggcccttctggagagttcctgtgagaacaagcgggcagacctggttttcatcattgacagctctcgcagtgtcaacacccatgactatgcaaaggtcaaggagttcatcgtggacatcttgcaattcttggacattggtcctgatgtcacccgagtgggcctgctccaatatggcagcactgtcaagaatgagttctccctcaagaccttcaagaggaagtccgaggtggagcgtgctgtcaagaggatgcggcatctgtccacgggcaccatgaccgggctggccatccagtatgccctgaacatcgcattctcagaagcagagggggcccggcccctgagggagaatgtgccacgggtcataatgatcgtgacagatgggagacctcaggactccgtggccgaggtggctgctaaggcacgggacacgggcatcctaatctttgccattggtgtgggccaggtagacttcaacaccttgaagtccattgggagtgagccccatgaggaccatgtcttccttgtggccaatttcagccagattgagacgctgacctccgtgttccagaagaagttgtgcacggcccacatgtgcagcaccctggagcataactgtgcccacttctgcatcaacatccctggctcatacgtctgcaggtgcaaacaaggctacattctcaactcggatcagacgacttgcagaatccaggatctgtgtgccatggaggaccacaactgtgagcagctctgtgtgaatgtgccgggctccttcgtctgccagtgctacagtggctacgccctggctgaggatgggaagaggtgtgtggctgtggactactgtgcctcagaaaaccacggatgtgaacatgagtgtgtaaatgctgatggctcctacctttgccagtgccatgaaggatttgctcttaacccagataaaaaaacgtgcacaaagatagactactgtgcctcatctaatcacggatgtcagcacgagtgtgttaacacagatgattcctattcctgccactgcctgaaaggctttaccctgaatccagataagaaaacctgcagaaggatcaactactgtgcactgaacaaaccgggctgtgagcatgagtgcgtcaacatggaggagagctactactgccgctgccaccgtggctacactctggaccccaatggcaaaacctgcagccgagtggaccactgtgcacagcaggaccatggctgtgagcagctgtgtctgaacacggaggattccttcgtctgccagtgctcagaaggcttcctcatcaacgaggacctcaagacctgctcccgggtggattactgcctgctgagtgaccatggttgtgaatactcctgtgtcaacatggacagatcctttgcctgtcagtgtcctgagggacacgtgctccgcagcgatgggaagacgtgtgcaaaattggactcttgtgctctgggggaccacggttgtgaacattcgtgtgtaagcagtgaagattcgtttgtgtgccagtgctttgaaggttatatactccgtgaagatggaaaaacctgcagaaggaaagatgtctgccaagctatagaccatggctgtgaacacatttgtgtgaacagtgacgactcatacacgtgcgagtgcttggagggattccggctcgctgaggatgggaaacgctgccgaaggaaggatgtctgcaaatcaacccaccatggctgcgaacacatttgtgttaataatgggaattcctacatctgcaaatgctcagagggatttgttctagctgaggacggaagacggtgcaagaaatgcactgaaggcccaattgacctggtctttgtgatcgatggatccaagagtcttggagaagagaattttgaggtcgtgaagcagtttgtcactggaattatagattccttgacaatttcccccaaagccgctcgagtggggctgctccagtattccacacaggtccacacagagttcactctgagaaacttcaactcagccaaagacatgaaaaaagccgtggcccacatgaaatacatgggaaagggctctatgactgggctggccctgaaacacatgtttgagagaagttttacccaaggagaaggggccaggcccctttccacaagggtgcccagagcagccattgtgttcaccgacggacgggctcaggatgacgtctccgagtgggccagtaaagccaaggccaatggtatcactatgtatgctgttggggtaggaaaagccattgaggaggaactacaagagattgcctctgagcccacaaacaagcatctcttctatgccgaagacttcagcacaatggatgagataagtgaaaaactcaagaaaggcatctgtgaagctctagaagactccgatggaagacaggactctccagcaggggaactgccaaaaacggtccaacagccaacagtgcaacacagatatctgtttgaagaagacaatcttttacggtctacacaaaagctttcccattcaacaaaaccttcaggaagccctttggaagaaaaacacgatcaatgcaaatgtgaaaaccttataatgttccagaaccttgcaaacgaagaagtaagaaaattaacacagcgctataagaaatgacacagagaatggaagccctggaaaatcgcctgagatacagatgaagattagaaatcgcgacacatttgtagtcattgtatcacggattacaatgaacgcagtgcagagccccaaagctcaggctattgttaaatcaataatgttgtgaagtaaaacaatcagtactgagaaacctggtttgccacagaacaaagacaagaagtatacactaacttgtataaatttatctaggaaaaaaatccttcagaattctaagatgaatttaccaggtgagaatgaataagctatgcaaggtattttgtaatatactgtggacacaacttgcttctgcctcatcctgccttagtgtgcaatctcatttgactatacgataaagtttgcacagtcttacttctgtagaacactggccataggaaatgctgtttttttgtattggactttaccttgatatatgtatatggatgtatgcataaaatcataggacatatgtacttgtggaacaagttggattttttatacaatattaaaattcaccacttcagagaatggtattcagtgcaaaaattcttagtttaactttaaatggaagatatgtatgtatgagaaatggccaacatgcctatgaaaaaaatgctgaatctcatcagtaatcaggaaaatgcaggttaaaacaataccatttttcacccatcagcttagcaaaaatgagtatattttttaacaagtgttggtaaggatgtggaaatgtgaggttcttgtagtaagaatgcaaatggcactctttgtagagtaagtctgttgacatctcataaaactgaaaatgcacacaaccctgtaaatctagcaactgcactcagttgatttcagcccatacatacaaagagacctgcataagaatgttactaggctttgtaaaagcaaaaaataaggaacaacttaaacatcatcagaaggggaactgataaactctggtgtaatccataccac

SEQ ID NO: 1259 - protein, 916 aa, Homo sapiens
MEKMLAGCFLLILGQIVLLPAEARERSRGRSISRGRHARTHPQTALLESSCENKRADLVFIIDSSRSVNTHDYAKVKEFIVDILQFLDIGPDVTRVGLLQYGSTVKNEFSLKTFKRKSEVERAVKRMRHLSTGTMTGLAIQYALNIAFSEAEGARPLRENVPRVIMIVTDGRPQDSVAEVAAKARDTGILIFAIGVGQVDFNTLKSIGSEFDHVFLVANFSQIETLTSVFQKKLCTAHMCSTLEHNCAHFCINIPGSYVCRCKQGYILNSDQTTCRIQDLCAMEDHNCEQLCVNVPGSFVCQCGYAEDGKRCVAVDYCASENHGCEHECVNADGSYLCQCHEGFALNPDKKTCTKIDYCASSNHGCQHECVNTDDSYSCHCLKGFTLNPDKKTCRRINYCALNKPGCEHECVNMEESYYCRCHRGYTLDPNGKTCSRVDHCAQQDHGCEQLCLNTEDSFVCQCSEGFLINEDLKTCSRVDYCLLSDHGCEYSCVNMDRSFACQCPEGHVLRSDGKTCAKLDSCALGDHGCEHSCVSSEDSFVCQCFEGYILREDGKTCRRKDVCQAIDHGCEHICVNSDDSYTCECLEGFRLAEDGKRCRRKDVCKSTHHGCEHICVNNGNSYICKCSEGFVLAEDGRRCKKCTEGPIDLVFVIDGSKSLGEENFEVVKQFVTGIIDSLTISPKAARVGLLQYSTQVHTEFTLRNFNSAKDMKKAVAHMKYMGKGSMTGLALKHMFERSFTQGEGARPLSTRVPRAAIVFTDGRAQDDVSEWASKAKANGITMYAVGVGKAIEEELQEIASEPTNKHLFYAEDFSTMDEISEKLKKGICEALEDSDGRQDSPAGELPKTVQQPTVQHRYLFEEDNLLRSTQKLSHSTKPSGSPLEEKHDQCKCENLIMFQNLANEEVRKLTQRYKK

SEQ ID NO: 1260 - DNA, 4741 bp, Homo sapiens
tgagtcaccacacctggacttttttaactttttaaataaatttaaattttttttttgtagaaacgaggccttgctgtgtggaccaggctggtttcaaacttctggcatcaagcaatccttctatctaggcctcctaaagcactaggattgcagacatgagccatggcacctagacttgaccctgggtttgaattctggctctgacacttgctaactgtgtgtgaccttgggcaggccactgacccttcctgagccttatgggaatgtgggaataatattaggtaatggagcaagttaatataggtaaagaatttagaatagggcctggcacatggcctcagtctagtaccagagtccaagcccataaccactgtgccaacactcttgtaataaatgtatgtgggagacagggaggctgggaggctggatatgtgatgctactttatgtcaactacacatgaattttatatgtataatttatataaactaattgatgccatctactattattagactgaacaaatattgttacttggaactctcagatatgtaatagcttttttttattcaaatccaaaatgtaaaatgtgactatgagtaattgataatgaacttaactgataagaaacttcaggatagatttttctcaagttttccattcagtcttacagtgattaaagtgatgaaaaattccaactatgcatgccctgctcggagcgtccaagaagagcctaccaacgggggctacttaagctctcaaaggccaaacacacaaacggcattttgagtgcaagtggtctgtttgaactctgaaaaggcggggcagcgggcctgcagctcctggagttcagggagacccggaaatctcaccctgccctcttcttgtgttgtgtttgtcacagccttgcccctcttgctcgccttgaaaatggaaaagatgctcgcaggctgctttctgctgatcctcggacagatcgtcctcctccctgccgaggccagggagcggtcacgtgggaggtccatctctaggggcagacacgctcggacccacccgcagacggcccttctggagagttcctgtgagaacaagcgggcagacctggttttcatcattgacagctctcgcagtgtcaacacccatgactatgcaaaggtcaaggagttcatcgtggacatcttgcaattcttggacattggtcctgatgtcacccgagtgggcctgctccaatatggcagcactgtcaagaatgagttctccctcaagaccttcaagaggaagtccgaggtggagcgtgctgtcaagaggatgcggcatctgtccacgggcaccatgaccgggctggccatccagtatgccctgaacatcgcattctcagaagcagagggggcccggcccctgagggagaatgtgccacgggtcataatgatcgtgacagatgggagacctcaggactccgtggccgaggtggctgctaaggcacgggacacgggcatcctaatctttgccattggtgtgggccaggtagacttcaacaccttgaagtccattgggagtgagccccatgaggaccatgtcttccttgtggccaatttcagccagattgagacgctgacctccgtgttccagaagaagttgtgcacggcccacatgtgcagcaccctggagcataactgtgcccacttctgcatcaacatccctggctcatacgtctgcaggtgcaaacaaggctacattctcaactcggatcagacgacttgcagaatccaggatctgtgtgccatggaggaccacaactgtgagcagctctgtgtgaatgtgccgggctccttcgtctgccagtgctacagtggctacgccctggctgaggatgggaagaggtgtgtggctgtggactactgtgcctcagaaaaccacggatgtgaacatgagtgtgtaaatgctgatggctcctacctttgccagtgccatgaaggatttgctcttaacccagataaaaaaacgtgcacaaagatagactactgtgcctcatctaatcacggatgtcagcacgagtgtgttaacacagatgattcctattcctgccactgcctgaaaggctttaccctgaatccagataagaaaacctgcagaaggatcaactactgtgcactgaacaaaccgggctgtgagcatgagtgcgtcaacatggaggagagctactactgccgctgccaccgtggctacactctggaccccaatggcaaaacctgcagccgagtggaccactgtgcacagcaggaccatggctgtgagcagctgtgtctgaacacggaggattccttcgtctgccagtgctcagaaggcttcctcatcaacgaggacctcaagacctgctcccgggtggattactgcctgctgagtgaccatggttgtgaatactcctgtgtcaacatggacagatcctttgcctgtcagtgtcctgagggacacgtgctccgcagcgatgggaagacgtgtgcaaaattggactcttgtgctctgggggaccacggttgtgaacattcgtgtgtaagcagtgaagattcgtttgtgtgccagtgctttgaaggttatatactccgtgaagatggaaaaacctgcagaaggaaagatgtctgccaagctatagaccatggctgtgaacacatttgtgtgaacagtgacgactcatacacgtgcgagtgcttggagggattccggctcgctgaggatgggaaacgctgccgaaggaaggatgtctgcaaatcaacccaccatggctgcgaacacatttgtgttaataatgggaattcctacatctgcaaatgctcagagggatttgttctagctgaggacggaagacggtgcaagaaatgcactgaaggcccaattgacctggtctttgtgatcgatggatccaagagtcttggagaagagaattttgaggtcgtgaagcagtttgtcactggaattatagattccttgacaatttcccccaaagccgctcgagtggggctgctccagtattccacacaggtccacacagagttcactctgagaaacttcaactcagccaaagacatgaaaaaagccgtggcccacatgaaatacatgggaaagggctctatgactgggctggccctgaaacacatgtttgagagaagttttacccaaggagaaggggccaggcccctttccacaagggtgcccagagcagccattgtgttcaccgacggacgggctcaggatgacgtctccgagtgggccagtaaagccaaggccaatggtatcactatgtatgctgttggggtaggaaaagccattgaggaggaactacaagagattgcctctgagcccacaaacaagcatctcttctatgccgaagacttcagcacaatggatgagataagtgaaaaactcaagaaaggcatctgtgaagctctagaagactccgatggaagacaggactctccagcaggggaactgccaaaaacggtccaacagccaacagaatctgagccagtcaccataaatatccaagacctactttcctgttctaattttgcagtgcaacacagatatctgtttgaagaagacaatcttttacggtctacacaaaagctttcccattcaacaaaaccttcaggaagccctttggaagaaaaacacgatcaatgcaaatgtgaaaaccttataatgttccagaaccttgcaaacgaagaagtaagaaaattaacacagcgctataagaaatgacacagagaatggaagccctggaaaatcgcctgagatacagatgaagattagaaatcgcgacacatttgtagtcattgtatcacggattacaatgaacgcagtgcagagccccaaagctcaggctattgttaaatcaataatgttgtgaagtaaaacaatcagtactgagaaacctggtttgccacagaacaaagacaagaagtatacactaacttgtataaatttatctaggaaaaaaatccttcagaattctaagatgaatttaccaggtgagaatgaataagctatgcaaggtattttgtaatatactgtggacacaacttgcttctgcctcatcctgccttagtgtgcaatctcatttgactatacgataaagtttgcacagtcttacttctgtagaacactggccataggaaatgctgtttttttgtattggactttaccttgatatatgtatatggatgtatgcataaaatcataggacatatgtacttgtggaacaagttggattttttatacaatattaaaattcaccacttcagagaatggtattcagtgcaaaaattcttagtttaactttaaatggaagatatgtatgtatgagaaatggccaacatgcctatgaaaaaaatgctgaatctcatcagtaatcaggaaaatgcaggttaaaacaataccatttttcacccatcagcttagcaaaaatgagtatattttttaacaagtgttggtaaggatgtggaaatgtgaggttcttgtagtaagaatgcaaatggcactctttgtagagtaagtctgttgacatctcataaaactgaaaatgcacacaaccctgtaaatctagcaactgcactcagttgatttcagcccatacatacaaagagacctgcataagaatgttactaggctttgtaaaagcaaaaaataaggaacaacttaaacatcatcagaaggggaactgataaactctggtgtaatccataccac

SEQ ID NO: 1261 - protein, 935 aa, Homo sapiens; identical to SEQ ID NO: 1257

SEQ ID NO: 1262 - DNA, 4684 bp, Homo sapiens
tgagtcaccacacctggacttttttaactttttaaataaatttaaattttttttttgtagaaacgaggccttgctgtgtggaccaggctggtttcaaacttctggcatcaagcaatccttctatctaggcctcctaaagcactaggattgcagacatgagccatggcacctagacttgaccctgggtttgaattctggctctgacacttgctaactgtgtgtgaccttgggcaggccactgacccttcctgagccttatgggaatgtgggaataatattaggtaatggagcaagttaatataggtaaagaatttagaatagggcctggcacatggcctcagtctagtaccagagtccaagcccataaccactgtgccaacactcttgtaataaatgtatgtgggagacagggaggctgggaggctggatatgtgatgctactttatgtcaactacacatgaattttatatgtataatttatataaactaattgatgccatctactattattagactgaacaaatattgttacttggaactctcagatatgtaatagcttttttttattcaaatccaaaatgtaaaatgtgactatgagtaattgataatgaacttaactgataagaaacttcaggatagatttttctcaagttttccattcagtcttacagtgattaaagtgatgaaaaattccaactatgcatgccctgctcggagcgtccaagaagagcctaccaacgggggctacttaagctctcaaaggccaaacacacaaacggcattttgagtgcaagtggtctgtttgaactctgaaaaggcggggcagcgggcctgcagctcctggagttcagggagacccggaaatctcaccctgccctcttcttgtgttgtgtttgtcacagccttgcccctcttgctcgccttgaaaatggaaaagatgctcgcaggctgctttctgctgatcctcggacagatcgtcctcctccctgccgaggccagggagcggtcacgtgggaggtccatctctaggggcagacacgctcggacccacccgcagacggcccttctggagagttcctgtgagaacaagcgggcagacctggttttcatcattgacagctctcgcagtgtcaacacccatgactatgcaaaggtcaaggagttcatcgtggacatcttgcaattcttggacattggtcctgatgtcacccgagtgggcctgctccaatatggcagcactgtcaagaatgagttctccctcaagaccttcaagaggaagtccgaggtggagcgtgctgtcaagaggatgcggcatctgtccacgggcaccatgaccgggctggccatccagtatgccctgaacatcgcattctcagaagcagagggggcccggcccctgagggagaatgtgccacgggtcataatgatcgtgacagatgggagacctcaggactccgtggccgaggtggctgctaaggcacgggacacgggcatcctaatctttgccattggtgtgggccaggtagacttcaacaccttgaagtccattgggagtgagccccatgaggaccatgtcttccttgtggccaatttcagccagattgagacgctgacctccgtgttccagaagaagttgtgcacggcccacatgtgcagcaccctggagcataactgtgcccacttctgcatcaacatccctggctcatacgtctgcaggtgcaaacaaggctacattctcaactcggatcagacgacttgcagaatccaggatctgtgtgccatggaggaccacaactgtgagcagctctgtgtgaatgtgccgggctccttcgtctgccagtgctacagtggctacgccctggctgaggatgggaagaggtgtgtggctgtggactactgtgcctcagaaaaccacggatgtgaacatgagtgtgtaaatgctgatggctcctacctttgccagtgccatgaaggatttgctcttaacccagataaaaaaacgtgcacaaagatagactactgtgcctcatctaatcacggatgtcagcacgagtgtgttaacacagatgattcctattcctgccactgcctgaaaggctttaccctgaatccagataagaaaacctgcagaaggatcaactactgtgcactgaacaaaccgggctgtgagcatgagtgcgtcaacatggaggagagctactactgccgctgccaccgtggctacactctggaccccaatggcaaaacctgcagccgagtggaccactgtgcacagcaggaccatggctgtgagcagctgtgtctgaacacggaggattccttcgtctgccagtgctcagaaggcttcctcatcaacgaggacctcaagacctgctcccgggtggattactgcctgctgagtgaccatggttgtgaatactcctgtgtcaacatggacagatcctttgcctgtcagtgtcctgagggacacgtgctccgcagcgatgggaagacgtgtgcaaaattggactcttgtgctctgggggaccacggttgtgaacattcgtgtgtaagcagtgaagattcgtttgtgtgccagtgctttgaaggttatatactccgtgaagatggaaaaacctgcagaaggaaagatgtctgccaagctatagaccatggctgtgaacacatttgtgtgaacagtgacgactcatacacgtgcgagtgcttggagggattccggctcgctgaggatgggaaacgctgccgaaggaaggatgtctgcaaatcaacccaccatggctgcgaacacatttgtgttaataatgggaattcctacatctgcaaatgctcagagggatttgttctagctgaggacggaagacggtgcaagaaatgcactgaaggcccaattgacctggtctttgtgatcgatggatccaagagtcttggagaagagaattttgaggtcgtgaagcagtttgtcactggaattatagattccttgacaatttcccccaaagccgctcgagtggggctgctccagtattccacacaggtccacacagagttcactctgagaaacttcaactcagccaaagacatgaaaaaagccgtggcccacatgaaatacatgggaaagggctctatgactgggctggccctgaaacacatgtttgagagaagttttacccaaggagaaggggccaggcccctttccacaagggtgcccagagcagccattgtgttcaccgacggacgggctcaggatgacgtctccgagtgggccagtaaagccaaggccaatggtatcactatgtatgctgttggggtaggaaaagccattgaggaggaactacaagagattgcctctgagcccacaaacaagcatctcttctatgccgaagacttcagcacaatggatgagataagtgaaaaactcaagaaaggcatctgtgaagctctagaagactccgatggaagacaggactctccagcaggggaactgccaaaaacggtccaacagccaacagtgcaacacagatatctgtttgaagaagacaatcttttacggtctacacaaaagctttcccattcaacaaaaccttcaggaagccctttggaagaaaaacacgatcaatgcaaatgtgaaaaccttataatgttccagaaccttgcaaacgaagaagtaagaaaattaacacagcgctataagaaatgacacagagaatggaagccctggaaaatcgcctgagatacagatgaagattagaaatcgcgacacatttgtagtcattgtatcacggattacaatgaacgcagtgcagagccccaaagctcaggctattgttaaatcaataatgttgtgaagtaaaacaatcagtactgagaaacctggtttgccacagaacaaagacaagaagtatacactaacttgtataaatttatctaggaaaaaaatccttcagaattctaagatgaatttaccaggtgagaatgaataagctatgcaaggtattttgtaatatactgtggacacaacttgcttctgcctcatcctgccttagtgtgcaatctcatttgactatacgataaagtttgcacagtcttacttctgtagaacactggccataggaaatgctgtttttttgtattggactttaccttgatatatgtatatggatgtatgcataaaatcataggacatatgtacttgtggaacaagttggattttttatacaatattaaaattcaccacttcagagaatggtattcagtgcaaaaattcttagtttaactttaaatggaagatatgtatgtatgagaaatggccaacatgcctatgaaaaaaatgctgaatctcatcagtaatcaggaaaatgcaggttaaaacaataccatttttcacccatcagcttagcaaaaatgagtatattttttaacaagtgttggtaaggatgtggaaatgtgaggttcttgtagtaagaatgcaaatggcactctttgtagagtaagtctgttgacatctcataaaactgaaaatgcacacaaccctgtaaatctagcaactgcactcagttgatttcagcccatacatacaaagagacctgcataagaatgttactaggctttgtaaaagcaaaaaataaggaacaacttaaacatcatcagaaggggaactgataaactctggtgtaatccataccac

SEQ ID NO: 1263 - protein, 916 aa, Homo sapiens; identical to SEQ ID NO: 1259

SEQ ID NO: 1264 - DNA, 339234 bp, Mus musculus
  misc_feature (1)...(339234): n = A,T,C or G
acactcgttgatcagtgtcttgctcagccatcattaggaaagttacctcctgcagcagatggaaacaaatacagagacccacagctgaacaatgtgcagagagtgagagaccttgaaacagtcttaaatggatgtctccatcaaatccctcccctcaggtccctgaaaattttgaagaagaggaggtagaaagattttaagagccaatgggggtggaagactccaaggaagcaggcctcctggatatgacaatcatggcctcactgagactgtggcagcacacacagaacctcatggatctgaccagtgctgagaaggaaagtgcacacaagtctccatttctaagtcagaagctaccttcagttgatacctgctcacaaaggaaaattagttttctacgtggagtctcagagggaagccaaactactcttaaggccaggctttatgcctgcagtagatggtcaacacaaatcgaattcaatggcgtttttagaggttttcacatatgttattattccaaaataatcattcttctatcagccagctctcttcagatctgacagaactattggtagccattttaaagaacccagctggaaacatacaagctcagcctagacagaagaacctcaattatgagattcctgggcaataataaatgattaccattttcaactactgggcctggagttagcttattaccctgtaataaattacactggtggacagattgaacatttcctgagacatcatctactaacgttctattagtgtttgatcagaaaccactaccatttgactgaccttgatggagcaagtcaatcctttctctgaatcttaagacacttggaccgaggtagcacaattcaattcctaagttctatagttagaatttgagatgcttctgaagggctacatattatgtgtgtagtctccagccatggcactactgggagacagtagaaaattctagagtagagcctagaaagagaccagatgtcatgattaaagggatgctttcaatgggcttgataattcccagccacaagaaggtgagcagtttgctctatcatgtatcctccagccaaaaaagcactgtctcgctacctgaaaccaacaaagacaactgtctatggactgaaacctggatcattgtgagccaaaatcatcttctctttctcattaattttatcatcttagatatgtgttacagcaacagaaaagatgactaccacactggacaaacacagcagaggcttatttctcacaattctggatgatgagacatccaagattaaggcaaaagtagatccattgtaaaagttctgcgtcttacaaaaaatggaacagagactgaaggaaaggccatctagagaccaccccacctaggggtccatctcatcttcagacacaaactctgatactattgttgatgccaagaagcgcttgctgataagagcatagtatggctgttccctgagaggttctaccagcaccttaccaatacagatatagatactcacagccaaccaccacactgagcccggagccccaatggaaaaagctagaggaaagactgaaggagttgaagggaattgcaaccccatacgaagaacaatatcaactaactggacaacccagagctcccagggattaaactgccaaccaatgagtacatatggagggatccagggatccagacacatatgtagcagaggatggacctgtctgacatcagtgggaggggatacccttgatcctgtggaggtttgatgccgcatcatagggagggagatgctagagaggtgaggctggagtggatgagtgggtagaggagcacccttatagagacaaatgggaggggtaagaagaggcatggggactctgtgcgccttctcctctcgaagtgctcctcttctacaactgttccgcggcggctgccgccatgagggagatcatgcacctgcaggctgggcactgcggcaaccagattggcgccaagttctgggaggtaatcagcgacaagcatggcattgatcccactggcacttaccacggagatagcgacctccagctggagcgcatcaacgtgtactacaacgaagccaccagtggaaagtatgtgccccgtgccgtgcttctggacttggagccgggaaccatggactctgtgcgttcagggcccttcgggcagatcttcagacctgataacttcttctttggtcagagtggggctgggaacaactgggccaagaggcactacacagaaggtgcagagctggttgactcgatgttggacattgtgagaaaggaagctgagagctgtgactgcctacagggcttccagctgaaccactccatgggtggggggactgggtctgggatgggtaccctccttatcagcaagatctgggaggagtacccagacagaatcatgaacaccttcagtgtggtaccttcccccaaggtgtcggacacagtggttgagccctacaatgccagcctttcagtccaccagctggttgaaaacacagatgagacctcttgtattgataatgaagcactctaggacatctgcttcaaaaccttaaagctgaccacacccacttatggttacctgaatcatctagtgtctgccaccatgagtggggtaaccacttgcctgcgattccctggccagctaaatgctgacctgcggaaactggctggtaaatatggtgcccttccctcgcctgcacttcttcatgcctggctttgcccccttgaccagccggggaagccagcagtaccgtgccctgacagttcctgagctcacccagcagatgtttgatgccaagaacatgatggctgcctgtgatccaagacatgggcgctacttgactgtggctgccgtgttcaggggccgcatgtctatggaggaggtggacgaacagatgctttgaacagaacgtccaaaacaagaacagcagctactttgttgagtggatccccaacaatgtgaagacagctgtctgtgacattccacctcggggcctaaaaatgtctgccaccttcattggcaacagcaccgctattcaggagctgttcaaacgcatctcagagcagttcacagccatgttccaacgcaaggccttcctacactggtacaaaggtgagggcatggatgagatggagttcactgaggctgagagcaacatgaacgacctggtgtctgagtaccagcagtaccaggacgctacagcggaggaagagggagaatttgaggaggaggctgaggaggaggaggtggcttagagctgtcttagtcactaaagcatgggagcagtgtgaactctttattcattcacagcctgtctgctagccatgtccactgtgcatttgctgtccggtgatctgacatcacttgtacagataccaccattaaagcaatttatagtgggggaaaaaaaaaaaaaaagaagaggtattgggatggggggggggagggnnnnnnnnnnnnnnnnnnnnnnnnnnnnnnnnnnnnnnnnnnnnnnnnnnnnnnnnnnnntgtagatgaataaaattattaattaaaaggaagtactgcatctttataggttactgctttcttgctgtatctccacatgatggaaaggccaagggtctccttacaggcttcttttataagagtattaatgtttggaggctgattatgggatggatcccctggtgtggcagtctccagatggtccatcctttcgtctcagctccaaactttgtctctgtaactccttccatgggtgttttgttcccaattctaagaagaggtaaagtgaccacactttggtcttcgttcttcttgagtttcatgtgttttgcaaacgcagacactgtcgcatacaccagcaagactttgctgaaaggaccctgatatagctgtctcttgtgagactatgccggtgcctggcaaatacagaaatggatgctcacagtcagctattggatggatcacagggcccccaatggaggagctagagaaagtacccaaggggctaaaggggtctgcaaccctataggtggaacaacattatgaactaaccagtacccccagagctcctgtttctagctgcatatgtagcagaagatggcctagtcagccatcattgggaagagaggccccttggtcttgcaaactttatatgcctcagtacaggggaacaccagggccaagaagtgggagtgggtgggtaggggagtgggggggggcatgggggacttttgagatagcatttgaaatgtaagtgaagaaaatacctaattaaaaaacgattattaaaatgctataaaaagaagagtactaatgttgttcaggagggctccactattatgaacagataattgctcaaaggtacatctctttgagctacaaggatgctcctctacacgattagaatttcaatatgagtgtatcagggtcacacattttctgactgtcattttctgctttggcaagtagcaggctcctgaactattcagcatccccagggctggcgtgatgtcactataacagaagcaattcaacactgtccacgctggagacaggattgccataaagaggtcttgcaggcagttagtgaaataaagcctttgaaacataatgggcttaggaaatttcgccatggctatctgaaacttttaaatgtatggtgatgttttaattaagagtaaaacagatgtaggccaggtgtggtggcacacacctttaattccagcactgacaggtgaatctgtgagttccaggccacatatgactacatagtgagatgacctgtcttagagaacaatatctccaacataagggaggggatgtgtgataaaacacacccatatagaaaaagaaaacaatacataggttttggataacacttgaagtgatttaaaacatgtatagagttataaatttttattatttttcacttgaaaaggccttggaaacataaaagtttatatttggaacaggtaaaaatgatcttggggtaacataatttgatagcaagaatgttctcaaatattggaaaaaataggttattctggactcagtgatggagatcagagtctagttaaattttctaactctgtgttgatgccttaactgaatcctcagctgagagaggctatttgcccagttttgtgtctcataattctcattctctattaggcagttttcaccatgaacaatacttggcaatctctctagaaatggaatcttgactttatgaggatcattggtcaagcgaaacaagttttgaatgaaaatccaatgacccctaagggactttcagtgtaaatagtcacaattttgtggacatgagcctgcctaatatataagcagattaatcacttatgatgttccaacattgaattaccactgaaattattttgtaggcagaacgagttgcttaagaatgttcaggaatcccaacaaaggtcaataaaagtttacttttatcctttaagaatagtaagagactaaatagtattgtgttctaattttcataatgaaaattaattttgacgtaggaacaagaaagtgcataccatgacatttcagactagggacaatcttgccttgatgcactgccctgctcacaatccctactctgggaggctttttaaagtgagaataatttgtcctgtgatttttatcagtgaagtaatataatttcctcagctagaaggaaaaatatgggcctcctattttttcacatatattgagactcccagtctatatttgcaattcaaaattgtatgcccttgatgatttgacctctacaggacttctttcaagaaatatttgaaaactattttatgaagaagaagaagattgcttcattttactgtgaaatactggaaatgagaagacacagatccaggcttcaggaagcttgcagtcaaccagacagacaggcttggaaatgtgttaaagggccacagattgtcactgaagcagcgcgcactgtacaccaggctgtacaaggtgggggagggtgtatgtcaagggagctggcaggaagggcatcacggtaaccgtgacacctaaataatccttgactgatgggcagaatttcacatttcagctagaggcagcagtgtgagggaacattagacatactcttcttacggttccaagtcaatgaattggattgtgccgactgtcaatcaagcagaacacgtaagagttgattgagatacagtttagtatctcgaattctaggaaaaactattttaattggcaggaaacaagaaacctcatgttttgtcaacagagacatgtgccctttccccttggttgatgctttcagcaaacatttttattaataagatggtaagtttaaaactttacaaataagttaagtgtgatgcccttccaggaactaagatcatggagtgattggggcatgtaattatttagattgacaaaaaaaaattggttttattttatctactaaaaatttaagttcttgtcatgtggttcttcttggaagtctcttaggctttcatctctgtttgctcatggcgcttcgcatattctcttcatgttataaattacccatgtgagtgtgtgttcctgccaaatgtcaacacccagagttagggctacgtcaaactcatctctgtattcagaagccatttgaagtagacgttaaatgattagatggtttgattaacagctgcttcctagggaattcactagacacaatttaaatggattatgccacatagtggtttatatctctaatgctcttattggattaaagaaaaaagtactaacaaggccaatttcttgactcccttaagaccatagtttcattaacagacccaaggcagagcaacacatactgttaatgtttttgttatagaagggttacatgcgcactatagaaacctcatatgttacagataagcaaaggaaagaaaacccctataatcctaacccagaaataaccagagttactgttttagaggaatttacaatgcgattggcacccactccaccctgcctttttcttcattttcaatgtacaagactaagttgccctttagcaagactgagctattatatacgtctctcattgttgagaagcctctttgcctctgccaacatcacacacaaaaactaatatttaatcctgccaaaataggtgaagaaaaaaattaataaatgcatatttcttcaaattctaattaagttaaacacttcattatgagtttgtggaatacttctatttccgggtaatttttctctctgtttatttgttacctcgtggctctttttttctaccagggcatgccactctgttactatgaaattgttctggagaacttaacacatgttaccaagctgtccccatgactaggccagtcacttgtcttttatcatatttccgctcggtgtcactgatcccagggagagggactaagaaaccaagagaaagatgcagctgtgatcccatcctgcagtcacttgtaaactgagtacacgtcatgaattagagtcttccaggaaaggaagcaaagagagaggcgagccttagaatatcaatttctgtgggatgagaacttttcagaaacagtggcaaaacagaccttaaaattagtagatttccctagccggctttgaactaatttaggactaatacgaataaggacagcacactgtaatactggcccagaaaagatataatgaaagtgcatttgagcaatggcaagtcaggtttggtaattacagtcaacagtaaggtcttttcaacactgtggatgcattgagccatttccacggggcatgcatgagagtcatgtatggctgtgccctgaaaactcaataaagaatgaacactcttatggtttggtaactaagaaattagctgggggcaatgctgaaattctttcttcttggggaaaaaaagcgggggtgggggcgtggggagaactatgaaggacaaaagtaaaagaagcagcaaagctgagagcccagaaaagagcagaaactgaagagagtgggaagcgaagtttaaaagagacacagtaactctcaactactttcccctcagaagtagcttcagaatccaggggatcatttatagttgtatttgatgtagataaataaaaggtgcgtggtttcatggtcttgctacctgaagtcactttaaaattcaacaaaaagtatttgataaaacctcaaacctatgggcataataggttgggatcataaaagcagtctaggttcaaatcgtttctggaaaaaaaggaagaaaggaaaggaaaaaagaaggacagatggatggatagatggaaggaaggaaaggagaaaggaaggaaggaaggaaggaaggaaggaaggaaggaaggaaggaaggaagggggctgtcttcacaggcgtgtttagaacacagagcatagctgataacagttttaaacctgattcattcctttctcaaggtatccaaaaatttgtctcttcagtgttataagtagcaaaggagaattgtgacaaagaaacaaaaatgtgcttagctacttcatgagcaatttaaaggttgagaaattattgaaacagtggagtaaaattcatcggcttgacctacagtttcaaagtttatttttaaagagtattaatctgatgcaaatagctaaattgaatagtctggacaataaatcctgggcataaaatgcatatataaaaatataactgacaaacgaggaaacaaattcaattaggatacttgagcaaatggaaaggttcaccagatgcctagggaaggcttaggaatcctgtctttaaatgggcaactgagccgctggactcacgtgatgccttttcctttggcctctttccacagtcaaccaaaaattcgtgaaggaaagcacatgaggagggagacacattgtatggcttgaaattctgacagaaacgtggttcatggcagtttgtgaattctcacacttcagtgttctgttttctttgggaataggcaggttacaaacccactggttgatgctgtaatggtcttcctccaaagaggtgaaaatgagctatttaaaaatttgttctgagcattttaaaatctttgccactgtggtcttgtcgtctttggactgggaatctcactaagtgagacttatgtctttgaggtaacactctaaggtaatgatttccattcttatggattaataatacatattttctctccaactgcggcaacacacaactaaaagaagttaagcattgtttaacctgtgggttaatcttacaaattctagtgtttttaaaaaaatcacacactatatgtatataaatatatgtgtatgtttactatgaatgaatataaatctgaatatagacacataatactatatatatgtatgtatatacttactgtaggtgtatatgtactgctatacccaccccctccacatattgaaagagatctcgaagacttacaagacagatatttataacaccagactattgaagcataatatatttaacagtcacaacatacctttatggatgtagacacaaacctacatagagaacgatgattagaatgcaagctgacttgattaactttagataaactcaagaaatagaagtgcaaaataaaacatacacgatacccttttttatttttagctcgactgttaaaaagccaattatctacctgtgaatgtataccacgcactgcaccgcaccgtactttgaggacacttcatagtcagaagtgagaaagcgtctgcccccaactgtcattgccgctatgaaattgctattaaaacagaaacctgaaagacttagtacccagctctgtgtgatcaaggaaaacctgggcatgagttggctgaggactgtcttgctgagtcctccgtgctcaccgagtgggagggtcacactgaagggacgaataagggcagagatgcgtcccgcttccactcgctgggagctggagcgggccactccgcggcggtgcggcagccctgtccggactccaccgcgcctcccaggggctctgacaccaacccaaggtaagctgcgcagctctgccacattttgcttgatgttgccttcacaagcccggtctctgccatatgctgtatttctggtcatttgcctgcatctgcttttaaagaaaatgtcacaaccgtactgcacaagtgcacatatttcgaggggaaaatctgcccacctgcattcccacgcggagacgaggggaccgagtgcatttggccagatcaggccactttgacacgctgcctataatgtggctcgtgtttgtgcgtccaggtcacgcgggctcgcgcgttccactttagttctcggtggattttctggttgggtttgggaagcagaagtgtatgcgatgctgatgcggatggaaggcacgcgagctatggaagaaggggtaaacgaacagagcaagctacgaatgctgtggggctgtggtctctagggttggatgctgtaaccgggagaggtgaaagccaggacgcaaagctcggacgctcgtgtacccggtggagttacccacttcgacccgcgcgggggtcccaagcccggcttaggctgtcgcggaggaggatccgggtctggtcccggagtacctggccctgtgtctccttcaacacgcagagtgcgcagcgcgtccagccggagcgcagccgctgtccccgctgtcctcgcagccgcggccgccgcggggacgtcagggtcccggcgcaaagggccggcgcctcgcctccgcccgcggccctcggctctgcgggaatccggccggcgccgcagccaccgccgcctggaggagggaggcggcgcgcatggtcctggagaagtttgttggcccggaaccaagcgcgccactgcacaagccagctcctttgaagcaggcgggagatgaagcttaaccttaccccagctaggtcgtggagggctctggaactagttgagtgggtgggcaggttacccacgtgggccccgtgccatgggggacagaggggaacgcatggtgggtctcggaggacaatggactcggcaatggagagaatgggacccagatgctgaaaatatatacttttaatagaaccatccaggaattgcgacagtgggtgatgtgagatctagagtgagtgagctgggagatggaagggtaacagaaataaattgtgcagcctccacccaccccatcaccaattcagactacttacttccaacctctccttggagaggaggtctgaggagcaaaagggatgagagagtactagaggcgctttagaagaatatacatctgcccacccccactcccactaatcagagctaaggaaagcaacactcctgtacaaatcaaggactacagttgttctttaagggaggaagaagcctggccgagaagggtggcctttaggttctcctgagtaggtgagcaaagcccgttgggctctttctaagtagaaagctcttcaccaggcgcctgcaaaggaggtaccgggatatcgccgtgttttcatggtgcaaattgtaagttctcaggcctgagatgaatggatgggattttctgatagggataattcttcagggtggaaagaggtagccgctaggaataggaaactcattctctggagggtttgaccagaatgatttccctaagtgttaagaaaactaagtaaggtgtcccagaaaaaaaaaaaaaagttccaacagtagaataggacaggagagccgctgcatatggacaggtacagaatagccaaaggaagggaaggaagccacgtgcaattatatttgcatctgaatttttgttatctccaagttctttccaaacagacgaaagcccatagtgctcatcagaaatgaaacctttccatctatttttctggtcctgcattttaatctcccttgctgaaatttctgttcattttctgaggcagcagaaacaggctgcgtcctgaatggctctagagacagaaggaaatatggatagaaactataggaatgggactacgtggaggttcaaacgaaggatgagcaacaagcagggataaaaggtcgtggagctgtagataacctactatgcagcccggaagtaaaacggtgtcgtggaagaccgagtgaaggggatgcgttgagttactccaggcaggccttcttgagaacttgtgcctcaaagaggcagaggataagcaggtttaacagaggagagcacgaagggaagacagaaggagaggcacgtgacagcttaaaggtgtcgagggatgagcgatgcggggtaagactgaaagcacaagttaggtgaagtctaagatgaagagagctgatgatacctgcagagaagagactgagaggggagggtgagaagcagagggtgctgtatgctgttgtatggaccaatagtaagacaaccaggtgaggaagccatatactgaatctaagggcaagatggtgagaataggcatattctattcaccctgtagaatgtgaacggaaaacacctcttaagaatgttctatcagaaagccaagagccattcagataaaaaatacactgaaaaagacgggtgaattgggaaaatatacaaagctatcaatatgaaattctaaatggcattgtatcttaggccgggatttgcctatggaaaacagaaccagagcttgtaatcagagagtagtggagggcggctggagttgttgatatttagggtatctgaacagctagtgcttacagctgtcattcagagaggtacgtcaataaagcagacacacagtcaagaatagagaaaactgcttaggtatgtccaaatagaattttccggttgacgtcttcagggaagtgaacactatttttgaaatgaaaggagaatatctatgggaccttgaagtatttgggcaaattcttcagtagtacaaatgttagcagtcaaggagtatgctttctgtcggggcaaagatcaacttcaacactattactattttggaatctcattaaatcacattcaccaagccttctagcgattttttttctctacttccctacaatttcttatttcatatgtatcctcctacaaatattaagcagtctgagtctcactgtattgactaatagatcttaatatttgtttcactttcatctaaaaaaattgcccaagactgcattccttcttccaactggttgcatagctacctacaggaggtaggtttcccggagactaaggaataaaaggtaacagtttatgtttctttaagaggataagtagagtggagacaatgtaagaaagcgattactgcttagtacagactgcaaagacgagtagtggagctcagtcagcctgcaaggcagcggatagtgaactgcttgagatggcattcacagaatacacaaaagtggcttttgaactgagagttgaaggcacagtaagagtgcccagatggtgataaaattggagagatggtccagcaataaataaataagtacataagtagataatgtatgtatgtttagaaagcacaatcaaggctacagttgcagtttagaggtagagaatattcttactatgtacaaagcccttattttgactcccagaacatgcactacccatcctaacccccaaatcgaggcagaagaatggcatttggggggtaatgttaatagtttgatggaaaagtttggaaagcagtagataagcagagagctggagagataagacttcactgtactagagccttatgtcccttgcttccagcatacaatgaaatgccactgagcatctacaggagagccctcacatgatcgggctggttttagaaacacaatattagccaggacttctcacacttacctgtaacctggcactcacactgggaggcgaggctaacactagtttgaaggagtccctggatacctagcaaagccttgacaggagagagagaggaagagggggatgaattttcagcagctgggagatggaaattggggaagggagagtggaggataggagtctagttagaaggctgttgtaactttcaggactagaaatggcctcgaagtaaacaaactcttttcatagtgaaagtgtacacattttcaaagggcatgttttggaaacagatttgacagacttccctccaggactgaggtgtatgagatcggggtgagggtgaggggtggggtggggagtacgggtaagggtggagaaggaactaaagatgattcggaacttcttatgttcctactttgagaatatttacagcaaaaacataaaggagaaaagattcctgtgcagtaagtaagagggtagaaacgctgcttaagtttcgtgagtttttctatgaatctatttcaatttcaataatacaataaattttgaaattatactgcacacctattccaaaaacagttgtgtttaattattagcttaggatttgaactgtttatgatagcgtttcctttcttgctggctttttttgtttcttcatgaaagatagactctcaagattgacaaaagaacagatgtgtggcacctgttgttgtgcatatttacacaatgccacacttcatcacagcagaactaggctttcctgatgccggagcacagtcaagaaagtctgattgaaaaatcaatcatccaccctattatttagcattccctctgggaggaatgctctgaaaatgtggcttcttgcagatgtttcacaggtcaaacatatttctctctctctctctctctctctctctctctctctctctctctctctctctcactcacacacacacacacacacacacacacacacacacacacacacaccccaaatcctttgttggaacaaatggaatttctaacaaaaatgattgtttgaaagaacaaattagatgtaccaatttgaaggacttgagatatttagagctttttctaagttattttgtaacctttctaacctgctgatttgaaagttgagctatgttacttaattatacagtgtacataaaatgaatctgtatcttctcccatcactttcttctttgtgtttatttgtttttctcttttttaggtgatggctctcatgtcgtacacagtctcaaagatgtctggtgaacttgtaaaatgttaattggcataacagtaaaagtattcatatgtgaaggagacttgattggatttgctcaggcattcactgacaggcttctgaacaatttcatccagcaaaaccctatcattccagccactgatccatccactccttcactgctctgtcttcttgttcagatttcctatccttcctcttgtttttttttttttcttttaaagaaagtatgtttactttgttctcctagaccacactgacaccaggcacttatttacttatttattgttagttttgtaaatgtgtattgcatgagtttatgtatataacatgcaaacatgtacccatagaacctagacacccttagtctccctggaactggatttacagccagcaatgaacttcttgatatagatgctggggacccaacctgggtcctctccaagagcaggaagtgatcctaactactgcctcatctctcagccctgacactagtaacttctatttgaatgttgctatatccccacccaattaaagatccataataaggctctcgtgtcagcaattgaatgaaggagtaaagttttcaatcgttccttcctttgctgcttatgttttctgtgcacaaatatatactatctattagaaaatataacaagaaattcttcaagacccatcatccttaaaattccttaggctttataattgctttaaagatcttgagaagtgaactaaggaagtttaagagacagcatccaaaactaatctggttggcaagggggtggggataagagtgggttacaagcagaaatcaggacctagttcctgccatggcaaagggaaataggctgtaggtagtgcaacctgaaggatttcagagggtttgtcttagcagatctactggtatctctgtgggctggtcagtgctgtcataagtatgacattacattgtgtggcactggataggaactctcagggctctgcttgggatcccagtaggagtaagtgaatatttatgagcaactaagggtctgagagctatgccttgcatgctgctgttaaacaacacatagtaacaacaaaagctttttgatcaagcaaacctgaacttgatcccaaggctctgggatagattgttctgtgagcattcatttctatggaataggcctctgatttctagctttattacaaggattggggccttgaaaaaggctctaacttcctttttccgtcatgtgtgtgtttttttttttgagagcgactcagttcctgaggaggcttaacaatcactcttactggctgaaccatcttgccaatccaatttgtttgggtaaaaggagaaaatgtgtgtttttaaaatcaataattttagtttttaatttttttcaaatatttagatatacattacatgatcttcttactctgtacctgtttttttaaaaaaagaattgtttatttatttacttattttatggatatgggtacactgtagctgtgctgatggttgtgagccatcatgtggttactgggaatgatggttgctcgcgccggacagcctcactatctccggtgagccccagtcactccagtgggccctgctcactttggcctaaagatttatttattattatatctaagtacagtgtagctgtcttcagacacaccagaagagggtgtcagttttcattacatatggttgagctaccatggggttgctgggatttgaactcaggacctttggaagagcagtcagtgctcttaacctctgagccatctctccagtccctctataccctgttaatgttagaggcaagcatagtttacttctgagctatgaatattaaaatatatactattcataaaatatgttttattttagaaaatgagaacacatagaaccaatactttctgtattgttattaaaaatatactgtagacatctctaatccaggtttaccagaaagccatttaaggtgctaagcaacttcagcttctgcatacattatgttgtggtgtcaccttaatcactgaactgggaaggattttggcggtgcctgtcttaaagctttcttgacctgtgaagaacagcacactaagtaatataacaatggcttgaagtaatttataaagctacctgataatccccttgctgagacctgaggggataaggtagaaaagtgccacattctgataaggggttttggttaaagccaagcatgaagaactccaaggtgggaaactagggaatgtccagcagcctgagcgccacctgtgtctgagggcagtgacaggaaagaggaaaaggacaggctcagacagtgcttcccattgcaattttatttgggaccaacccagcaaataacttattagaaaatttagaaaatattgctagtgaaatggagaagtggaaaatgtaaatgagatattcaactggatagaagatagacaggtagatggatggatggatggatggatggatgcatagatagatgatagatagaaaatggatagacgatggagtatagacagagagattgattgatttatagattatagatacatatatagatcatagatagatgatagacagctatatgatagatgacagaaagatgatagatgatagattatagacagattgattgatttatagatgataaatgacaaatacatatatagatcatagatagatgatagttatatgatatatatatatatatatatatatatatatataggtagatagatagatagatagatagatagatagatagatagatagataggcagcaaacagagagacagaagaagtcaagtaggaaatagtggatctgaaggaagatgagaagggagtctaggtactgtgaagttaaagaacccagtgaccattttcaaagggaggaaggcttggctattggaaattccataagtgattgagttaggatggagagtgaacagattcttgcttaagtttctgctgatcttgctgtgagatagtggtcagaggctcacacgtaaacatttgatcaactaagtcatatgatcttaaactgaaaacacttttgataagtaaggttgatgctaaattctgtcattctctgagcagcttaaggaatttgttgggcgatgtcaagactgaattcatatgcttgtgactatagcttctttaattctttgttgtcataataggagccaaagttgtgatgaaagtgaatttctaaaaccatttaacattttcactttttagatatgaaatcaacctgagtgaaagaggcaagtgtactgcaaatgagactaattagtctatagcagatatagcagcagatatctttagagtatgtagttcaatgcatacatgaatgtgactttcatacattaaataagacatctgctcctggcttaaaagtgaataaatcaaaacttaaggatgttctataacttgcatacaagtgacagaaaccacacaggaggccaagattttaattattatgtttcagtgctaactgatcaactaagagaaagcacaatcacagaatccctgaaaatttgatcaatatttgatgtagaatttatttaagctagaattcatttgtttaacagttactggcatacacaaaatagtagctgtgatcaatttgcaaggttgcatgaggatcttgactctgtttatagctagaattcaaaataaagaaggcataagagcagatgtttcatatttagagctacacatagagctttaacattgtaatcaccgcctctagcgactcatccagaaatatctaaaatctcgaattaattctaaaatgctgaatggagtgtttggcatttgtatgtagaacatcaaagatgataaaggtttttttctctaaagagagtctattaacagaagttagacaattgtgtgatgagttctcacatatttagttcttcaattaaactgtggatagtactaaataagtaatttatgactcttgaatagacatttttaaaaaaattgtaattgtcaaataaagagagggatccattacattttccttggaagttatttccattttaactaattaactacacagtaaagttaatttaaacaatgtttgactttttgtaagagggatctaaaaatattttatttgtattattttgtatatatttggatgtgttgcttgcacttatatccacacaacatgtgtgtgcatgatgcccacagagacaaaaatagggcatcagatcacctgggattggagtgacagatcattgtgggtgctaggaattaaacctgggtcctctggaagagtagccagtgctcttaatgactgagccaaatctccatccccctagagattttgtctgctgagtatttcattgtaagatctatagagcaggaatataaattcataaaggcaatgatgacattaccaaagcattataaaatgcacaataagtactacacgtataagtttccttttaaacagaatgaaaattgcatatgtgcagtggtaagtttaggagtaaggctcagtccaataacaaaattgttcatgtaagatatgatgatgtcaattaagccatgatatgtcaatatattcccaaatatattgccaatattcccaaacagggtcatgaatgatcacatcatgtttaaagttctgtatcatggaatttgataccaaatgtataataataagagaaaaatacagtccactacatttaaaagtttgtgtatgaaggcatgcagtcagtagactgataggaaaacccatggtctctatttcttaggagagaaattttgtatggcataagctgataaagagtgtttaaaaaataatttaaaaagtaccagcatggtgttccttcccacctttgatgatttatgttccagatgaaagacaaacacagccttatattttaatatgccttaaggagcacaatagctgtgcaactttctaccctccatgctgttagcatctacctcttattgataaccccattattactttaatgtcacatcttggctgctctaactcctataagtcaggcctctgggccacattctcttggcccctagccccagcactctccttgcttctttagcccgtaatggaccccgtgatgtcccttctctctcttcatggtctctagcctgggaaacttaaaccctatctatatctcttcaccccaactgttggctactggcatctttatttaacaatcagtattaactgccagcagggtccctcaggctatatgcagactccaaatattggagcctagcacttagtgatagaatataatcagtattaggccaacccaaagggtcaaaatgcagaatgtatgaaaatgtaacttaataacagctgactgtgttaagagaaaacagggaaagattctgagtctcatcaccacagaaatacaatgtatctctacagaaatacatatgttcacaaggtacataaaatatgtttagtatcactcaggaaaatactaatcaagaccacagtgggccaccctttcattagtatggtatctataaaaactaaggaaaatatcaatgtaacagagaggatggagaaatcaactcatctgtgcaccactagtggaaatgtgactggtgtgggcggtatagagaaactgcacggtggctcttcaggaaattaaaaatatgagaaccatactgtccaccctgtgttttcttctttgagcatataaacaagagaattgtaactggggtcttagactgatcctgtgcatctcttcacagcagccaagacataggagcaaacaaatgtcccttgaggaatgatgaacaaaacgagcatctgcagactgtatagtatcactaataaactgttaggatcttatactattggcttggaaacagtttagtcagtaaagagcttgctgcacaaatgcagggaccatcatcaatgcccagaactcacttgaaaaaattgggtggtgatgtgagctggtaaacccagctctggggagaagagctggctggccagctagcctactccaagcagagaaagtgagctgaataagaaaccttgtctcaaaagaacaaggtggagggctcctaaggggtgatacctgggactgacctatgccttccacacatacatatgtatatgtgcagtcataatcacataaatttacctttgggtacacacacacacacacacacacacacacacacacacacacacgcgcgcgcgcacacacacacacacaaaaccaaagatattgtactaaatgaaataaagtcaccaaataaagaagacaaaagtggaatgactctgtgtatttaagatgcctacaataattaaacttctagcaaggaacgcaaagtgatatttgaggatttgcaaaaaatgagatggcatgtttttggttaacaggcatagattttcagttctataaactgacaagaactgtaaaggtggatgcggctggggattgcaaagcaatagcaatgaatttaatcccactgacatacatgcctctaaatggatggaatatgaattttatattataccttaccacaaattttaaaataaaaagaaacaatcgtctgtgcaatatatctttaaaatcactaaaaaggtgggagaaatttaagtgataagaagctgactttatgagtaatcaattgagtaatcgactaagaaggaatccagaactatttcccaagcactcataaaaatgaaagtgtgtattgaaacactcaattgcatgttagagcatcatataccctgatatataactatatggtatgtggatatcaattgatttctccctgctggtgatgattttgtggctgtgatggaaaataccaaacttgaacttgaacatttctgccattacagatctgtggccatttgtttccatggttacaaggcacaatgaggcacactggctcttggaaattgtggacctgggtgacaaccttcctgcttcctgcatgtacctgtctgacagtcagggacaagccaggtatgtgggtcacctctctacctgattgattaatgttatctatagttcttaagccattaaaaaaatccatcaaagcaaatcttattaaggttggagaggccacagattagctttactgatagagactagagaaatcagtattttctactactgaccttcagagtaagaccatggcgaatttccaaacttcatgtgcatgttatcaaacttttgtctgtaattgaaacttataaatatgattatatgcatgtatgcctctgttcatacatctgacatcatctcacattttagcctttaaaaataatttgttcatgttataagtctacaagctcagcactaattagaactaacaaggacatgtctacctttaattaagaagaagtgaaaaagagactcagaagtgtaaaaagaaatagagtttaattgcatgtcagttttgtggtatcttagaggagagaaacaaaaggtgaatacatctttaaaggatccaagaaaacagatagtatttattttcagttattaaatttatgaatcttgtcttaaatattcccaaagggctttacagcgatttggagcatttattttattttattatttatttactttacgtatatgagtacactgttgctctcttcagacacaccagaagtgtgcatgagatctcattacagatggttgtgagccaccatgtggttgctgggaattgaactcaggaacctctgaaagagcagtcggtgctcttaaccgctgagccatctctccagctgatttggagcatttatgttcagcaatgatttttaaaattaactgtgactgaatagattattaacctatacagcctttatgttgcaagttagagtgactatattagagaatatataatgtgtgtgtgtgtgagagagagagagggagagagagagagagagagagagagagagagagagaaagagagagagagagagactccatgtttactgagtaccacatgagatgcattcaggtgataatcacaaatggtgttgtatcgtgagtcagaaccttgctctgtatattctcttgagcatttcttgagagtactcctcagctggttatcttcaattactttgttttaatctctaactttagcaactcgttcatttgtaagaatacttgtcatcacctctgcctctgttaaaataattacttcactgtaagtaaagagaggtaaataggtataaactccctctcaaggaggcttttgagtttactcacacataggataaaacctcacttataaacatttaacagatccttgtacatttaattatttgtcaataatttcacaggaagcccattttctttgtttgttttttgtttgtttcttttctgagacagggtttctctgtatagccctggctgtcctggaattcgctctgtagaccaggctgcctgcctctgcctcccaagtgctgggattaaaggcgtgtgccaccactgcccggctaggaagaccgttttctaaaacaatccacagggatgtttaaatgctgtattaatatattattaatactatggctgtcacaatcttggcaaaaagcatcttttcttcggcgagaaataagtgaacagcagcagcagctaacaactccagccatgttacagtaaaaagcgcgtagggagagtgactgtattctgaaaatctgcccgcgtaagtttatgttgctttaggaagagcaggggatgtgttgcaatttaacactgatggctgggcttcctgacttagaagggaagataaagctttgtttgagtggcccaatattttggccatgctaatatgtagaaaacggctttgaatggaaccatggttagaaggatctacccatatggttctctggttttagcaagagaaagagtcatggcatgtactgatacctgactgctgttgatgccatggtaaactcaggactttacacctttgacaagccaaccagttgagtctaatgcaggatgaatgcagcatgtggggaaatactctctctggggataattaatgccattttattttccttctgattcactcctaagatggttatcttccgttattttgttttaatctctagctttagtaacttgtttactgtaagaagaaggcttgttatgttttacacacacacacacacacatatatgtatatgtatatatacagatatatatatatatgtatatgtattcaaatgcattctagctccaaataccttactgaattagtttctttgaaacatctttccttaagaacccaagtcgtaatatttacaaaacattgcactaaggggattattcgaggcaaaactgagttgggtcaagcaatttgctagaggggtgcctgcaaagcaagaagccatgtatattgcttcacttcaagtatcatttgcatgaactgaaaatcagcacagcactgtcgcagggtcggttggagaacatgacccactgccaccaggtctgccaggagactcttcttgtgtcgtgccttgtgtgtctgattcacagtgcaaggttcccgttttagtctcctcatgtgcagacctgtgtgtgtggtcactaaccgtttaccggagggaagtgattacatctaaaaataaagtctagcaaatctgcgggagaggctagggtttcaggtctggacttggtgaggttgtcaacagtttacagttaaaaccaaatgtaagaaaggataactcaagtctccgtggctgtcctccatgctctgacagcatcagtgtctccgtggaatattgttgcaggtggggcagaatttaagaatagtttggaagagactttaagcatgtaaattgaaaaatcttgaatccaggcacttccaattctttgattaagcttacattatattcacattatgggataagatacatttgtgtattttcatactgacagtaatatccacttgactatttgatagcttcacctgcgttgtcagggtagagaagaaaagcatattgacatatgtacaatgctgggcaatctccaaatgtgctttaatcagttgcttagaactggatcctctataatagaactgtccacatcacatggttaatttctcttagtgtatccttgtattccataacaaattattataggaaatcttacaaaggaaaccagagtgaagagcacaggtggaatcaaaggcagggcaccatctaagagaacttttaaaaacaatttccaaacagcacataagctgtctagtttattctgaagactctcacgggctcaaggtaacacagaagccctgttaattcaattctctgctaagtgaaagggaagtttgttattctgaaacatagcttatatttattgataaaaacctcttattaatctcatgtagaaactttaaataaatcttagtgctcagtatggtaccacctgaaaatcttcaaagcgacacacactgtatttaactcttaaatttggagagtagcagaagagatggtgtccggagaacatgcctcttagccaagtaactcctctagatgatttggttccgagctcactagtgaaggtacttgtatgactgcttgtgagctctcccttaaaatagttctgccctggtactttttatcatctgccacccccttcatagtatttctgctacactatagtccagtatgctttgtctactcctgttagccactgattagctcccagcattgagcagcacatactcagttctcaaatgctttcacagcatatatagtgtgtgcacaggggctggaagcacaaccaggaaggatgagtagagaaccccccagactacctccatccaatcagaaagtcttgtggaagagttgggggaagggctgaggaatgcagaggggatggggactccacagaaagaccaacaaagtcaactaacctggatccttggagtttccagagactgaacctccaaccaaagagcatacaagggctggacccagacctccctgcacatatgtagcaaatgtgcaacttgatctttatgggggtcctttaacaactggagtggaggcttaccctgactgttgcctgcctgtgaatcccattcctctaactggtcggtcttgtctggcctcagtggaagaggatgtacctggtcctgcagggactgtggttgcctgggtgggttggtacccagaggtgattgccctcttctcagagatgaaggggaagggagacatggtagagggtgagtctgcagggtttcgatcaggaagtaaagtgaataaatacatttaaaatacagaattctgttttagcctttaatatatatatatatatatacatatatatatatatatatatatatatacacatttatatatgatggcttagtcagtaaaaggcttgcctttcaatcagaagaacctgagttcgatccccaggacttacttaaaaaaaaaaaattccaagcatggtggcacactcttgtgatttcagccatagggaagcagaggcttgcaggtcagtgagcctagattacaatatgagttgtaggccagtgagagaagctgtctcaaaaaacaatgtgcatggctcttgaaaatgacatcggaatggtcctctggtctctgtatacatgtgcacacatctgtacacaaacccatatacaccttcacacgcacacacacacactctctctctctctctctctctctctctctctctctcacacacacacacacacacaaaatacagaacacccaagagatgttttccatctgtttatgcaaactaagcagtcccacatctgcaaacacccgctgtctttacgttctccaatgctgatcttgaggagaagtgggatcataagtaaggaaagtaattttccttaatgaaggcttgagattgataagaggactatcaaatgagctagatttcaaattatagttttataagtgaaagtcatcgcatacattatgtatgtgtctgtggatctgaagaaaggaagaatcaaggcagaataatcaaggcacaataatcaatcaataagcaaatttccccaggtactaaggtgctctcgttctcatctcttcttgtcagactttctgtgtgatcgatcgtctgtccccgtgcttcagaacgagttatgacctttactttttgtgtgcattgcagctttgatctgtttcagttttgtaccttccttccctcccctcccnnnnnnnnnnnnnnnnnnnnccctccccttccctcccttctcttcccttcccttcccttccttctgtctccctccttcctcccttctctgtctgtcctccttcctctttctctctgttgttaagattttagttggggtgtaatatttgtatatatttatgtgatgcaatgtggtgatttgatatgcttatataggtgtggtgatcaaatatggtaagaggattgtactggctagttttgtgtcaacttgacataggctggagttatcacagagaaaggagtttcacttggggaaatgcctccatgagatccagctgtaaggcattttctcaattagtgatcaaggtgggaggtccccttgtgggtggtgccatctctgggctggtagtcttgagttctataagcgagcagcctgatcaagacaggggaagcaagccagtaaggaacatcccttcgtggcctctgcatcagctcctgcttcctgacctgcctgagttccagtcctgacttccttggtgatgaacagcagtatggaagtataagctgcataaaccctttctttcccaacttgcttcttggacatgatgtttgtgcaggaatagaaaccctgactaagacaaggatttatatgttcttaaacatttctccgtgtggggaagtgttaaattcctattttctcattgtttctaataatttatattataatagtataataattttcataatttataattatgtattgttaacttgcagttgtttcttctgtaagatggaacattgaaacccatttttcaactttcccctttccctctttctctccctcccttcctctccttctccttccacaccctaactctctctctctcttcctttccccccttctcaagtttctagttttcggaacaaacacctaacataaggaacatatttggcccacactttagagttcagtttagtttccagcacggcaagaaagtcactgtaccaaaagattaagatgactgctctctttggttggtgcagaggatggccccatctggcatcaatgggaggggaagcctttggtcctgtggaggcttgattcccctttgtggggggtgctggacgggtgaggagacaagagtgggtgagtggtgaaaggttcaccctcatagaggcaaagatgggggatgggatggaggtttgcagaggagaggggggacaacatttgaaatgtaaataaataaaataacctataagaaatgacgggtctcattgcagcacagttgggaagctgagagatgaatgtgggtgtttagcttgctctctattaatcagcccaggcacccagcctacggaatgatgctgcccagacttatgttgggtttcttaactcaattaacctaacagaggtctccccctagagagaccacaaagactgttgtctagtaatcctggatcctttaagttgacattaagcatcacgccttcaaggattcatgctattgctattccaccctctacttttgatgaggtgggcttttcttttttgggcatcaacatctgaacaagaacagacagtatttttcttcccatggcagacttgttcttcttaacataaggtcttccagttatcctcagccgtccaccaatgagaagacccaattcatctttagggttgaagcccaccatgtgtggatatactacattttctttgttcacttacttgtcatcaggcattttggttgactccatagcttggctgttatgaatattattttaataaatacctaaatgaacatttttgatgtaagaattatagttcatttgggggtatatctaatctagtagtggggtagtcggatcatgtaatagtttcattctgggttctctgagaagttccatactattttccacagaaactgtaacatgttggtgtcatcagtggacaagagagctcctctccatcgccaccatctccatctcttttttgtctttttcgtcatttgaattggagcgagatattctcactgagtttggatttgcgtttccccgatgctgggtgatgctggcattttccatgtttttccccccttttgtacattgtcctcggagaaattcagataatttgcctgtttttaaatcagtatctgttttgctcttgaggttttagagttcctttcatgtctggttattaaccattagcctctagtcagctgaatagtttgcagatttttttttttttttggccatctgtctattgtctctttattgactgcttcttctgttatacatagcttcccagttttatacaattccacaattcataaacttctatgcagccatttcaattgacatctcaatcttaacacttccagaaccttccactgattaatacacacgctgtcaaataggggattccactgagtcagacttttatctagttaagcagagtaattgtccttcctccttctagacatccacctgccacatcttgctgattcttgcttcgcatttcctctgctttttcccatccctgatgctttgtctgtagtccaggctaacatcatctctgggctcacagagtgtgggaaagcaaataaagtagccagataagaatctcaaggaccaggctaaatctgaagtttagataaataatgaatgatgttttcatctatgcctgggtattccagatatttttatcagtcttacttatgctaaaatattttcattatgtatctgatatttgattatgaaacttttattcatttcctatgttgggcaatcctatatggtataatgggaagacacgggtgagcagggaaggctgagctcatgtaggcacagttgagtggaggtacaacagcaatgaggataagacacatgaacatctacaaaacatccagcataaagattctgaggcagaggacagctcagtctaaggaagaaatggtacagaggccaggatcctgcagttgagggcaagaggggcaatgaacctcaggctactgtgattgtaaaaactctgacgtctaagtctgcaaagtcaaaagagagaccataggctctggcacattgaccagagcaatacacaccatcttgtgggttctcctatgaaacagtgtttcgcttgtctgtttccagaaaacataaattgttctcttctgcattagtattctaagtctttctctcagacttaactcacacttatttgagagctgtaatagagtcacccatttttacccataagaactatgttgtggatcccactggctgttacaaattatggttagcactcagccttacatacactgtctgccctatacatacattgcttacctgtagtgaagagcagcctataaattggactcagtaagagattgacagtaaagcaggtaccaaaaatagaaaaatatggatattctgtaatatacatttaaattaaaaattatttctggaatgatttcaattaatatttgcagatttcagttgcacttaggtcactacagctcatgatgcaaaactcagaacaggagtgtttctgtggtgtataatacacaatgccctactgctaaaaggctgacatgatatacacactttgtttttatctttgtatttaaatcatatttagatatattcattttgttttatgtgtttgaatgtcttgtcggcatgtgtacatgtgcaccatgcgagtgtctggtgcctgtagatttcagaagagagtgctggatctcctggacctgaagtattggttctggtaagctactgtgtcgatcctaggaacccagttctgtttctctgcaagaacaacaagtgatcttaactgatgaaccatccctttatacattttagcaaagttaaaatactaattatatcctctccctgcaaacgactcattttcttttcctgcaatacgtgaagtgttttgtaaatactaagaccttcagtaaactataaagagtctaatagaacatgcttgcctttattcttcatgacgctgaaacctcagtttcctcggtagcttttgtatacacatgaatgaacttacctcatgctttttcctaaactagagttgcagagccaaataactcatatttgatatgaccaccagtaaacaaacacaacaaaactgaaacaatagattttagctggccttagatatggcaaaaaagggcgaaccaatcaatcaatcaatcaaccaaccaaaaaaaaaaaaaaaaaaccctaacaaaaaaaagctgaagaaatcccaacatgctgtaagtattctggtgaataaatactatattaaaatgatgacttatgtaactcaaaatagaagaaaagggagcatgtatttaaagatgagcaggcttttttatttgtcttcttgacaaacaaaacttctgtttgtctatttatatttttatattgtgtgtttcagggatcttgttaaaattttcttgcctataaccctattcttatacatatgtttaatgtttctctgcattattaaaaatatttcttatggagctagagatatggctcagtgtttattgacacttggcacatgaaacatttttaaaatgtcttatgaaaagaagaaaacttctctcaagattctagtaggccaaggctgctggtaaaagcagaaaggagctgacatgttagtgtgtgtgtgtgtgtgtgtgtaaaagtgggattcattttttaagcacacatttaaaaccaatgggaacaaatgtattttattaaaggagggggtttcgtaggtatgttattactttgtttagaatatgttattgagagatgtttaataaggaagaaggaaaagttggtttacaagaatgtgttttattctgaactctgccattgagtagctcagtgattgtgtttctctagggtgactcttttttcagaagaccagggaacagagggttaagagatgcctcttctttaaaggcaagtgagataaagtcatgatgtatgcaaagttgagctgctgatttcctttctgtttcctgccgctcttttcaggatcccagcagcctcatagacagcccaggtctttcaagccatgtagagaggaaattaagtctgacaatgatcagcattaacacttcagcatgcatctgctgaaatgacttgaatttgcttgtgagaaactgttgagttctgcaagcactgcatctttctgaaaaggatggcattcattactcttagaaatactccagagagcctctgagggacagagttgctgtgcttggtcctgtttcttcaaatattgtgacatttgagtctcttgcataagtctaaagtcacattactattaaaacgcagatgtatgtttgtatgttaatattttaataaattaacatattcaacctgtaatagttaatcccactttttattaaaatgcatatatcaatatttaaattaattcacatatctagcttatggattggcactgatactgctttgtccattttgtgcagcaaattcatgaatcttcatgaatttatcttattgtgccttaaatcttaaaacacttggttttaatttgctttgctcatctgttcacaacaaagcatgtggtctaaggtaggaaatggcatttatgttttataaactgaatacttttaatggagaaatatataactattgctggaaatgttgaatcccatttattttcagagcagggtgtttattccgttgacatcaacatccatttgctaggaagagtttaaatgagatttacagtttcctactggagacaggccacacacctccccctccctaccaaaggctcacagcagggaagcccttctgctgcccagagatttgtcccctcaatcacatactgaatctttcctgtatgtgcacacaggatgaagaatgcaaggttcttattaccatttattggcttataaatatccgcagccaatatgcacttttattggaatttttgataaatttaaattatagaattgtttttaggtcaaaatatttactcaagagggctgctgggtttccccctgtgttgagattttgcatatatagggctgatgtcagtagatgttaaaggcacaacacgtgggatttttttttttacatgtgtctgtgtacatttgtataactattaccccagtaaaatcataaaatatatcctggattctagaagatttctgtgtacctgtcctgaggcaacacctctctatggtaatcactcctctgaagcagattggttatataattatcacattaatggaataggtaaaatttatttaggggggatgatacttccctagttagtttacttctaaggtcaaacagtttcatgtatcaagtcaaataatccttccttccttccttccttcnnnnnnnnnnnnnnnnnnnnnnnnnnnnnnnnnnnnnnnnnnnnnnnnnnnnnnnnnacctcttgttgataaacttttaggttgtgactctctaagtaacaatagcatgggcagtcttatcgaagaagatcatttgcagtcctgtttggcttttacgtctctttgggtcattgagttttcttacttagagtcacacatcattaacttccataaatactgtcaaaccgttttctcacgtggtcctgccactttccaccaccacatgccacggagaagcttgggaaatgtcaccctttgccacaccctcatcaacactgccagtgacggttctttaatttgagtaatttaacagaatcttagcacggcttcctttccacctcttgattactaatgaagtggaacacttctgattatgtgggttggtaatttggatattctgtcttgtgaagtgtgaaaagtgttttgaaacaaacctttttatgatttgctcatttgtgggagcccagggtttgttctgggtacagtacttcgctgcatagtttctctgcttgtgtggtttgccccctctctttaaggtctatgtgttaaaaagcaccttctcctattcgatggcttgtcttctcacacatctgatcttttgattaacacgtcttttaattttaatggagacctgtttaccaatattttcttttgacagtaatgctttacctctttcaaaacatcctttgcttctctggtttcacaaagctttatgcattactgaacctctttaggttttacttctcacacttatagtaatgtattccagtttctgcatgtggtgtgaagatcaagattcagtgatttcctgtatcaatgcctaacaccagaccccactggtgaaaagaccttccatttcccattaaatttctgtagtctttttttttttagtaaatgaagctatatgtgaaagggtctgcatttggacttcctgctctgtctgattaacgtgtctttctatatgtacaccaatgccatgttaaaagaattcctggtatctcacgtctgtctccaagttactgttcaactttgcctctagctattttttgtttctttgttcttccatttaaactaaagaataagcttgccagttctcaagcaccacacacacacacacacacacacacacacaatacatacacacacatacatacacacacaccacacacacacacacacacacacacacacactgtgacttataggaattgtttgacttgtaagatatgtgctaaccctatttaaaccttgagaccgttctagttaaatatgctgtgctgagtccatccaaccaacattagtctgtgtgcatttttcagacgaagggctgaggcattcagtgattaactgggaaatcagaggttttcactttcagccaagcagatgaacagcttggtcataaggagtttatttcctgtttgtactataaagtttaagatataaacctttgacgtgtggaaaattgaacgtgtgactgaatgatgtacttagattaggagtgtagctgtggcatgatttgaaaattgggtggcagttttgcctgcactctttctttcgttagtaggtctgaattagatttaaatatatcagttcaaagaataatgtatgtgtatagattactgcgtttgtatgatgtggtttttttggacacataaattcattgaatagagattaactttatctttatctctctgaatatcactgacacacaaagtattaattttctcgatttttatcatataagaagatctctactttctaattatttttaggttttttttttctgttcatgttccattgtgtcataaaagtttacgatcatgatcatctgattacaaaacctggataaagttatgataaaatacagtaggaactcacttgtttaactggttggattgaagagtttaatgaagctgtgaaattcagttgaatcctattgtcaaaactatagaaacacatggacgtctgagcaatagtgataacactcgtccacataagtgtgttttcaccatgggccaggcaatattctaaatattttatatgaacaaacattaaactttcatagacatacagaggggaggatagcattagcctcactttacagaaatctaataaatgattcaattaggttttattttcaattttatcttctttatgattttatggtagcagtcaactttatttgggaaaagtacgatgggaaatttagttcaaattgtttgtttgtttgtttatttatttatttttaaatagaaacaacctgccctacactgagaacagagagatatcaagatgacagaaacaaatctgaattgtcaggtaagcattataattctttgctaggtagtactttgtgcgaagttatcaccagatacaccatagcccaatttttggggggcatcattatcagaaattttgtggggtcccttcatagtggccagatgctgtatgattgaggcccccgggagtggggattcagggagggtaaagtatattatctcattaaaggaataactattccacccatctctacagtaggacttaacagggaatgcactgtcctagggtggctcctcagccagctcattggccctgccagatggaaagttaggtctctaccaagccagagatttttatcccctgactagaaggtgagccttagtgctactctgcccgcattactggttaagatcacagcatccacatagagaagtaaatgctgaaggagaaatactgacagcagagttccttattgtctcatctcagagtagcagcaagtccctgtcccgtctctgttccctcaccgcagaatgaacaaaagctgtgtgaaatcacaggcatccatcctgccttctgctgcagttttgaaaggagagaagaatatttatgaggtgttttagcatccagatgtcacgatttccatacaattttggtgcaacatttttatattttttattttttctatttttttgggctattaatgttgtcattgctggattttttattattgtcattttctttgcttgtttgcttgcttgttttttgtttgtttgtttgtttggttgtcggttttctttttgaccaggtcatcccaggctggtctcctcctgcttcagcctctgaagtatattctaggtgtgtgctactaagaccagccaacattcctattcttctctcccaccttcctttccatcgcctctctctgttttctccatcactctcgcacacgcgagatgataacgtgtatgctgcgtctggattctaagcatttcctcacgttcctataattctcctgaagtatggttttgtaagatgctgtccagattttaaaccagttactactactttttactccaattttctgtttacacattagagacggcacaatgaactattgaaataacttgcttaggtcaattcctagattaaatcggagtggtgttttattccctgtaaacatctgtgagggggcaagcatggtggcaagcatgtgcaatcttagctaattgctttgtattcagaccaggcaaagccaaaaaaaataaataaataaaaaataaaaaataaaaaaataaaaggacgatatttacgatctgttctttagaaagatggctataccttttgcatgcaaacagaattttattcttctgtaccataaaaggaaaataaaaaaaaaagaaatggaacacatttgctgatttcaaacaggagtttttattttagtttcttttgttttttgtttgtttgtttgttcgtttgtttgtttttaatcaatcaacctgtggatatggataacaaagaatcctgtttaaagatcaatacgtctgtgagtttattgctggttttaataacatgtcacattttacaggctttgatctgggagaaagctttgctctgaggcatgcgttttgcgaaggtgataaaacctgtttcaagttgggaagtgtgcttcttatcagagacactgtgtgagtaaagtaatttgtttttcttttcatgttaaaaatgctacaaaattattttctaaggatattccaaattattgctcaaaaattaaaaagctcagtagtgtaccccaaagctgtaacaaatacacaacttatgtatttattattgataaaactctgaaatcaaatcctttatatgcataaagaaatggtctttagaaaattaaatatattttggggggagaaacctaattgacatttaacatagacataactgatattatattttaaaatgtgaactttgaaacataaggctcaatgtagattcagagacaaaagactagtactatatttattcccgtgtatactctgctctgtgattaattccaataacagcttacccttgggtgctctctttgtatatggaatagagtttaaagggtagagaaattgttttgcagggctttttgtttgtttgctatttgtatcttgggtcagacttgaacattcccgtgtgtaaatgtaccattgtggaagagcactatgttcgccctggtcttagcatgcacatagatgacttcgtgtgaaaatgaattgacatgcgtgcgtgttctcgctttcctcgggagtcttcttgcctttccagtgattctttgttttagacttcctgttttgtgacactttggattactttaatttaacgacgttcttctgttcattcactgatgggaaacaaagatactgaggaagagcataatttggtgttgcagggaatataaggagggaatgtcacgtgggggggggcttctgtccggtgccataaggtatagctgtttatgggacctatgagcagccactgaggacagcccaacagttctgtgcttggttacacatatgctgtaaggaaaagcaaggcacacatgcgtgcatgcgtgcatggagtgcatgcgtgtgtgtgtgtgtgtgtgtgtgtgtgtgcgcgcgcgcgcgcttatgaagggggaggttaactagtagtagataacatttattaatacatttagaaaagacaatacattatgttcaaaaattaagatgcattttttttcttacttctttttttccgtattgatctaaatcccagcaatcctggcaatgtgggaaaagaattgattggacagactcattttaagttcactggacttttaggaaagcagattaagcggatttgaacggtactttcactactaggcaatgctgttctccccttgagtccacaggattataaatgtgaggcttgaattgaaattcgtttccaaccttagctctaaatcagtcctcagcctctagacaatcaatgaaagtgcattttctggctctgcagagcataaccctgttcctccaggacaggaaacaggagggtgtctgcttaagccgactcccgactcccgagtgtcaagtctcttgactcatccccaggttcgttttgctcaggcagccaagtgtgctaggatgcttctctcgcatatgccattttgggttttcaatgggcctggagtaaagttgcagctatttatacgtttgtaaataagctgccctgcggagtcagcatgggaaaaggcggatgctattttatatggaaaatgaaaatgctctccgtgcctgaacttgcttttattgttctggcacgttccacttgacgttcaggagggaagaagccttctgagtgtgggaatcagaaacctatctgaggctcaatatcctcagcctggcttcttgagagacacccaaagtttgctcaggcaagggttttcaagatatctatccttatagctttattactgtacacttagagctatattgactctagggtatctgaagcgcttgctatgtttttcataatttgaaactcctgtttcttcagtacttcttgagctaacaaaaggtgattattagagactggctctttaaaagaatctaggtggcctcctatttagttgtctgaattatcttgtcagagtaagttttttgtcccactcttagggttcttagattcattgataaaagtatttaagaatggattcaaatggatccttgaaaacaattttattggtgttgcaaagagagacactgagggtatctaagtagcaaagctcatcagctgcccagagaaggagaatgggagagaaaagaaaagcacgatttttgacaggtagaggcatgtctgggagtaaggaggcctggagtgtcagggagggaaagcttgcttcgctcagagtataaagatctccatataaacggtggaaagaacagggaaagttacttttctgtgtaattgcgagaagtgagcagttgcactctatatggatactgctcagatgcactcggtgagacactgtgctatgcggaggagtccagggagggcaggaacagtatcattaaggaaaactactccacctgtctctttagcttatcttaaggggcaggggggcggtgtctaccttgcttggaccttggacaggccactgacctggcccaactggaatattacatcatcacctaggccagagatgctcttctctcttctggatggagtttttttcttcatgagctttaattactactcacaatgcaagggtgatgggtcatgaattttgaatttctacgtattattgattctaaagtcatggtgctcagagctggattgggaaatagatgataaagttcaagacacatattttctgaattattattgattccaatgtggtcaattaccctatctctcaggctatttatttatatatttatttagatagtgaccgtctgaaatactatgttagcatggattctgggctgtaccgatttgtgtagatttttagcactatgacccttcaggagaaaggaaagtgtagcgcactcaaatgagtttcaaatctgtaactgctctgacttatgatacaagtctggaagattttgggttttgcatttcaagtaacacctatgaataagggtgaagggatgctagccatgaaaaatatccagctaattagactttatgtgctaggataacattctttatttgttaagtatttaacacatatggcattgggtatgttaacaatcttaaccttttgcaatgctaaaacaattctacctggaatggaataaatacgttctgatttttgttaccaaaataatctctagtgagaggagtcatcttctctgtcccattaattacgttgttggttactttacgaaagcagggttatatagtaccaacattttcatagatgtcagggatagtcaaggagagggtaatggtggacatgagaggccaggagagggggtggattagtttactttcctttgaaaaaatgttgtgaccaaaaaagcttgtgaaagacagagtttattttgacttatgcttacagatggagagtccataaaggcaggggaggtggggctggtagcaggtggctggaacagggagcatcttcaactacaaaaagaaaatcgaatataccagaagtgggcaaggctgtgatctctcaaagcagaccttcagagatgtgtttgccttagtaaatttgaaccacctccatagacagcattgctctctgggaaccaagtgttcagatacttggtggggcttttcttatttaaaactaccatagtttggtagcagaaatgatggtgaggggtggcagtagacactaagttacaatgagatgggagtaagtcttggctttggattgtatagaagggtagtcacagataacaatagtacattgtacgtttcataaagacagaaaaagatctggaaagtgtctccttaaggaattgatgaccatttgaggtggtagatatgtttaatttaactttaatatcatacagtgcaaatatgtctcaaagttatatgataccccattactatataataacttttatatataattagagtaaatttaaagataggaagtgtgcttgcagtccattgagagggtagaagtgtcaataagcaataaaaaatgttaagaaaatgtcatataaataaacactgagcatgtctcaaaaggagggagtaataggtagaaagtattctgatctgtatttctgtcctttagactttttcaaggttccagactttagcatctccttcggaaatcacctgaacctgagtagtgcacgggatagcttatgtcaaaatgtacatcttgtctttgctgaaagatcgatctcatgaacatggctccttttcacatggacttttatataagctcaggtctataatagccgggtcttatagggagaacaacaaaatgcaggaaggtgacttttaatctctatgtatgattatttctgatagtctgatgtttagaaataaaaatccatctttagggatcttaatagagaatactaactctgttctatcaccttcatattcttgtgtattttgtactttctgaagtcttctgtagcattagggcctgtggttttaaattcatatctgttgtatttaaacttaaaactcttgcaattacaaataagggtgagagtgctttctaactaccatagatgatcctagatggttgtgttagataaagaataagtaacaagtagccttggtaagtccctgaaactcgtgtaatcaaagtttatttcagtcaacagactctgagctccttatggctcagcactgaatgacactaaggcttccactggtaagggatctgaccctgtcttttcttcctggaacctgctagagagatacagaataggagggaaagctacacggtcctaaacacttcacagctctgtccattttcctacaaatgtcatgatttcattttcctttgcacctgcacaagtatccagtgcattacattttcttcatctattcagctactgatagagaagcgggctggctccacgtcttagttgttacgaagagtatagcaataaagatggaaacgttacatcacatgcagcgtcccagactgataagccaaataccacatatttcctctcatatacacacataacgtataaatatataattattaatccacatatagctacgaaatttaaaagggaaccacaagaaaggggaaagtaaaggagaagaaaataaaacagaaggtaaaataaaacagaaggtactatgacatgaaaaagaagacaattgactggcgaggaagacttgcaggagccagtcaggaggatgggggagggaaggggagggtgaggattgacagggacaaagtgtgtatgaaaatgttgcaatgaaactcataatttcatatggaagaaaggaagaaatagcagctagagatagcagagttgggtggtttagctgttaaaaacacttagtgctcttacaaacaattgggttgggttcccagcacccgcatctggtggctcacaacttcctgtaactccagttccaggaggacccaacacttctggcctcttaagatatttgccctcagatgcacatacagactcacgcaaattaataattaaaaacaaataaacaaacaacagcaaatagtaatagtaaataataataataataaaatactactactactactaacaacaacaacaacgacaagaaaaaaatttttctttccctttgtactgaccgaatctgaaacctcctgtctttcacggtgcagcacagttcagctacaaagcacaccccctctgtcactgaggctacattttaagtatttggggattttcattccttccctcatatgggcctgttttctaatccacgtttcccttcttttttgctcttggttgggttctctccaagtactcagaaacagctaaattctgaggcatgaaactgtgctcagctctgacacaagattctaattcctgggcgggtttgaaggatcacttggcagctccattaagctacggagagtgactgcatcccctgggttttcctttggacattcttttgttttgagatagaaagcttcctatgtaagggccatgtgactctgctaaaaccctgtccagctgtttcatgagactgttacacatgaatctaaatgtcatcgctgcacttccttaattatcatctggcatgccaagaatgtgaggtgagtcactgctcatacattctaaaatgagaaggaaagtctactggacttcacggctacagaattgtctaagcaagctattttagcaaaattacttagtattagatctgaaagagtttaaaggtaacccttgtagaggttttaaataatgtatagaaatatttaattactaatagttaaaagaaattatctcagatttttaagagaaattcaaggagtttttaatcaacaataggttacttaatataaaaatgctactaaaatgtaaaaatgatgaaaaaccctccaagtatgtttgtttgtttcagagttttatattttgttcctccaaatttactttataattagatagatataaattaatgaacagaaattaaacaattgatacatctaacaatttagcagaacctgatcatataatttcaatatttttcaaggttatccttaagtattccatcatggggctcataaaaaaaatcaagcaacatatgaatacttcagttgaatgttatatcaactatctgtgacataattcctctataatgcaattttgaagaaccttcaagaaatttttgtatgtaaaaaacatgttagtcaaactctcagcccagtataaaggaacatttctcatttgtcaggtggagaattcttttgttcttcatttttaagttcaatatcactgagttgattttgttcaaaatccccttgggaacataaggaggtatgaatacaggctacattgataaaacattgcatcttttctagactctctctgcttctaatacttcagaagtgtaggcattgaagagcattcttgcattaattgcaagaaaaagtaaaggagagggtcctttgaggtcgcaactatgaatgcggtcctgtggttatacaaatcctgctttatggtttatgggtggaaaaaacatgaagcacattcagtttcttgtcagtcacatagcagggtttagggaagctatatattctcattatcaaacttaagttaactgggtagtcttcattcagatttcagacactatattattttgtaaggctgatttgcatgagtaattagccataaaggtatagatatagattggtggttcccttgactgtgaatccagagatgaataatcttattccttcagaaacttctaaaattgtgtatctatttgtgagtgttagcagacaaaacatttagaaactttaaatatttttatttcacatattgtaaatgacgacacaacaaagagatttatctacataatattaatatatgtttaacatattggtaaggtaagaagtcttcactatctccttcaaagagtacagtcttaaaagtcaaacaaaacatcaaacaaaaggaaagcaaatgcaagtgagatggtgcaggatcctttgcaagcgtgcctctttcgagattcaagtgcagatcagcttttgaaaggaaagagattgtgctcctgcttctcacagaaatggtgtttttttcctccagttggtacaatgcagatgagaatactagcatgtacggcacaacactccctgtacaacagtcagggtgttctcttagcggaaggaaaggaagcgaattgaaaaccagctttgggtctctgaatagacagttagtgctttaactgttcagaggaaaacagaagccctgtgtgggaaggatatgactttggggtgggagaaacagaaaagagtgggaagagaagacaggaagggaaaggatgggagtgagagaagatgataggctggtgccacaggttctgttgactgacattgaatcctgggaagagggaatctcagctgaggaaaaactgcagtcagaaggccaggggacatgtctgtgggcattctaactccccgcctccccaagtttatagggatgtggcagggatccagtacctctgattctactgggcactgaggcagcattatgtatccacataacatcacagagttcttagtaaatatagttctactgactcctggttcttcacggggctccaaagttagacataaatataagcagttctctctattgctctcatgttggcttgctcctttacacacacacacacacaaacacacacacacacacacacacacacacacacacacacagagagagagagagagagagagagagagagagagagagagagcatataaaaccatcgttgctcaggaaggctacagagaaaagcactttacaatattaggtcattataaagttcagctttgatgccagtggggggggggaaatgaaattgcaacaaagtattgcattcgactctcaaacggtcatgcgtagtctctgtgggttgtaagacaaagaaaggcacgtccatgctttcaagttatttcagtctccaaagacagagaagccaacgattagccattatggaatgcaatgtcttctatatgtggcacacatgctgagagaccagatgacactacctggaaacggtttcacagaggattcaaaaggctgaggtgtgagtgtgccaggcgggctgggggacgacagtgtgttcaacagcgcgtgcaaaggctgtcaaagggaggatcactgtgattttaaaggtcaaggcagttgactaactcccgtgtagttagtgaacacgggtataaggatatctagataggcaaggcaaggcagaattaatttggaggccacctgtactgatctgaagagtttgtttgaacttcattcatctaaaatgctaaaggcattaaaaaaaaaaaaaaaaaaagcagtagcaaccaaccttagggggtggggtgggggaagaaggaactgcgtgaaggccattgagaaatcacagctttcagttaggtgtgagacttcctaaatggatccggaagcaggagctgggcacccagatcccagaaggacatttcagatttccagggacgtcttgtgaggactcagctttattcaggacgctttgaatttccttgcgtgagggacacctggcaacactcgcttgcaatggatctctgtttctaagaagcaacttgcttaactcgccattaggttttggttttgctctgaagctgaggccgaggcatttgtaggagggcctgtgctcaacaggaagccatttgcaacaccacaatgaacaaatgcttacccgaacaggcgaggaattattagagcatcacccaaactttgttttcccattaacaagctatgtgtctgaatcctcttagcaaacacggaaaaggctaagatttcagactctctgtggctctgaaaccaaacattatccccaggcccgagggaaaggcatttagacagacgctccagccccgctcgccaaattgcttgtaagtagacaggtgatgttgaatgtcagctgggaacgaaatgacttactataaactccaggcatctctcacttcgctctcaggaaatgtaacttgtatcatatttctcttcctggaagctgttcagcaagacggaggcctcagtgatactggtaaatacggaagttctttataaaccctgcctcacacttattcagaatggaagagttaatttggaaccctgttcctgatatttaaaaatagaatctttttccatgtggccatccatttgaaaagaaaaataaataaacaaatgtcagtcttgttaaatatgatctggaaagcttgcattaggtctactgaaatagcactttttaaaaggcagctttactttaggctccgggatctgaaactggctggagagttagccttgggagcactgtctgtctataatcgacaattacgccttttgtatatgtcactgtttggacgtaaagtacgcttgatttggggaatataatgtacaaaatgaagttttattgaaaaattatggtcccctggtttgtttttgttttttgttttgttttgttttgttttatttatttatttatttatttatttatttatttatttatttttatgagcaccgaaaatttgaaaacatgcaaatctttcttttttttttttcttcctgtcttcccccttgcctcacatctttttattacacagtgaggaaagaggagagaaggaaatagcaagtaggagtttctttttcttacaaatctcttattctgcagtttgatttaatccttgactttgtgtgtgagacagagatgctgtctgccccactgtgggctgtgatttccttagggatacagaaaaccacaccagcttgacctttctatacaataaaattacttaatataccaagagaaataaatttatgtcgttcttcctgaatttgacaaatgttccgtgctcagccccctggaaaggagggaggaagtgaagtctgtccccttgagacgctcccctggtttctcattggccagagacgccttccaacttgttcagttgaaaccttccatccttgtgaaacaaggctctttacatcactacgttaactttgtgggttggtagcaacgtcagaccctggtttgggaattcagtggacgaacggaacagaatagacactgatctgcatgtgggatctctccaaagggttctcctttctatcattattcaaaatcatcatatttatgatcattccttttatgtcttaaagagctgctccccacctccccatgttctggcaatcacacagatccagcgtgtgcttggcacacttttgtagcagagagaaaatggccccccaatgcccagcagacctgccccaaagtggcttctttgttgttcctaggagtttcacagctcctaggtgggaagtatttctatctttttaaaaaaagccactaagcctttggctgttatcaccaagacctacagctaactgagccctgctctttggactgtgttcaacatgtttcttgtttcttcatcaggaactcactatcctgtgaaaacccaaaccaactctctgttcagataacccaagctccagacattgcttccacatgaggaagggcagggggaaaggaattatgtttatccttttttaaagaaaagaattattcatctttttagttaggtatcattctattagttttctccctaaggtgttaaaatctcaacctagtggttttcttttataagacacacaggcacttctcatgaaaactcttcagcactttttgtctcactgtggtatatatatataaataaatatatatatatatatatatatatatatatatatatatatatatattatatatttgctaactgctcttaagatcttactcctgcttgaaaactgagttaatattaaagaagtacttgtccaaaataaataactaatctctaaggtgtataagggaaatatttctgattttacctttttagtatgactgtgtgttttgtgatacttcctggtctgtgctcagataacggaacgggaaggaacttgtaattatcaactcctcggggagataccaggcacctaggatgtacaaatgtcacagtgaatattttccttggagaccaaatatgatttgtttctgttgttgctaatatcattgtgttattgtaaacattgaaatgaatcttaaattctataaaactaatattttatattaaattacacactctccaaagctcaggaaaaaaaaaacaaaacaaaaacctagagacttcttttcttcatcagaatcagaaaagattatttctaagtcaagtcaatagtgatgaggagaatcttatttgtagccaagaggaagcaagcaacttgatatcctggaaaaaactgaccttggaataaaaagccactagttcaagtcccctcatgatctctccttggcagagagtcagaagggtagtcatttaaggtatgtggctttggtttgtcacttaggaattgaggaagttgatgtaaattactgtcaagatttccttaagctgtaagagtacagtatatgtttcatatgttttcatagttcatgtttcatagttattatgactgcaagaatttttttggaggaatactactgaataattttttgttaaaatcttcttggagcatctggtaatgttttctctacagtggtcatgaatctctgtggaggtcttacatttctcattggaagtgaccatcggatgggttggccttggttgtttgtttgttgttgcttggatttttgatgaaacttcagtgtcacctggtccttagttgttcctgccattttactgttggttagactgtagcgcagtttctcaaggtttaagcaagggagcatagatgttatggtcattgagtccatggggcaggatcacaggtgttgtgggtttctgcaaatgttgcaggttattgttccagtggttgtttaacaggaacaagctggccacagccctgttttcatggaaaccattttatggtagttgggaataggcaataaatgtgtaagacatctgaaatcatagacgactggaaaaaatagggcaaggtggtgtgttaggcagtgactggagctatggcaactttcagcttcttagaggatatgacatttgaacagaagagacatgaatgaggaagagagtttgtgtaaatgcaaagtctggaagcaaattctggaaagaaagccccatgagaaggcacagaagacaacaggcaaaggcttcaatgaccacaatgtattcaaagagtcataatccaggttactgtgactaaccatggctgcctcacagaacctggtgtagaggacaatgtttcagaagcaggactgagtcagttctgggccagcatcagaaatgtgcccttcacgctaaaaacttgaagacatgctctaaaagttttatgtaacagaggtatcttgtctgatttttaaagtttattctagctaccaagtgcaagccagactgaaaaagggaggggagtatataatcatgatagtgtaacaagaatccattggaaagatgtcgaccacatggactcaggcaaggatcgtgcagatggagaagagagcattgaactgcagtctgttttggtggtggaagaagtaagacttgccagtggattgggttggtaatgaaggaaagacaagagttaagctgacttctagggatctgactggaacagctgggcgaatggctgtgtctctattgagttgtggaatgttgatggagggaagtgtttggcttgaaaagcaagaagttgaacaaaatggtcttcaagtagagatgcccagtaggaacacaggcatgtaagtccagccaagtttgacaaaggttatatctcccctttagcatctctctttcactctctccctcccactttttctccttctctcactccttcccttcctttccatccttcccttcctttctatttccttccctccccactttccatttcctttccttcccttccctctctccccctccctccatccctttccttctctttctttcccctcctctcccttcctttccttccctccctccatacccttctcttgcccgtctctctatccttcctggtgacattttgagtgttcagatctccgaataatggtgtgtcatttttggtctggctaactcaggggtattttggactccaaatttgctcttccttctgtgttctctactaaaatgtccttctttcatagtaatccctgtagacctcggctctgtgttttccaaagtgagaatgattattagatgacctggtaacaacatgtgactggttttccagggttgatgttgagtaaggtctagtgtcaacagagcttgtgttttataaatgcaagcattatccagggaggaagagaagcctagcagtggatattaggtgcttgggctttctgtgaaagcaatgtataataagaaagatgctggcatcttccaacactctttgaccttgtattacacctttaaatgactttggatgtacaattctatttcacagtaattaaaggtacacagtgattaaaaccattctctgtgtcttgccaagagctttcctataatgcacaaactatttaaactattatcttatttgtattttctaatggcttcaactcaattctacttagcaagaaatctcattaatcaggaagggaaaaaattcactggagaacctacttaatgtaaaatttggataagtctagtctagtctaatgttctgaacaatgaattctttcatgggtacataaaatgctatttttttaaaggcagtttcttgtcttagtgttctgttattgttgtttaattttaaatatatgatgaaaatattcactcaggtacatttttattgattttttcccatcttttctgatgcttcactgttttaaattcatatgcaaagtatgaattaaaaacttaatttttgcccaccataatagaaaaatatatttattagtttacttatcagcattcaaataacttgcctctcaacttacatatcagtacacatggcattttgtatattaggaagaggtaaaagcataatctatatcatctttctatcagctgggcctctgagagacacaagttaacttataggtcatttttaacacttagtatttttttttccaaatggaaagggttgtgggtttttttatttgttttgttttgttttgttctcttttgtttttttcatgacagggtttctctgtgtacccctggctttactggaactcactctatagaccaggctggcctcaaactcacagatccacaacactcagccaagctgtggtttttaaataaccattaataggatttatggtctttgaaaaaactgactaaatacagaaaatgcaaagataaaaataaatttttctcaattttgacaccctgagggaaacactgtaatattcagatttctagaaaatgtatcttttgctggtgtcaaccccctgctgatacaagttctaatattggacaccattttctgtcctctctggcaacttcaaggaggtgggtaccagatcctctaactcctcccctacagcttcaatccatttctttcttctgtatggttgaattgaggctgctgtgtggagatcatcagagaagagatggaaactaagagatttttgcaacactgaagtaaacaacaagttcaaagtcatttaagatgtgtaaattgtgagacttcagagatgctctggattctaccttagcagccaacacaaagggaacatcatggtagccactttcttccgcacctctgggtcattcagaataaatttaagctcactctctatgaccggtagtcatctaaattgctgattttatatctatcattaaattggcatgtgtgtgctcacacctgtccataaatatttaggtaacacaaatgaatgtgaagaacattcttataggaaatacacggtggattaaattcaaaattccattgagccctcaagtataggtgaatgttaatgcatgggaataaaattcatattgagaatattgaactagatgcaatgaatataaaataggggtgaaggcataaaatatgccatagataatttatagcatagtctatatatattcatttgcatagagcttaacaataattttcttaatgggaatatcactgaataagcaacggataggatttcttataggaaattacactccattcaaaaacattcgggctggatatcttggacatagcaagctgtcattatatctctctggtagcacacaagtaatctaatatggcctcttttataatagaaaccttggcaaggcccagagaaattattctgtaccgcatcacgtgattgcgtgtgtgtcttctaagcaagaagccaagtcggtagaggcaaatatagttcttaacgccttacttttaactatacaaatttttctttaaagcttactttctgtgaaggcgaacaaaacaaaacaagaagaatatttgtttttgcttgaaatcagcttttgaaagatgattataaatttctaaaagggaaatatgataattataaaagatcttcaaacactaagaatgcacaccagagacattgcttcactgtgtgtttcaagagtgtaattattacatattaatcatgctgattagttatttcgacacaacagaaactttaagatataaaaacattttaaactttaaaattagattataagttagtgaaagaattaggttgaatttttatgtatgaagtattaaagatttacgctaaaattaagcttacctttacctgtcttgtttcttgatcacttatttctttaacgaaaagtcatcaggtggcctgtcaaaatgctgatagcccttgtggtaaatataataaattccatgtcgaatataaattgtggtgactataataaattccatgtatttacccaataccctctgaacataccccttgagcagatctgagtggttataactgaggcccaggcaccatctgcttctgcttcccaagtactgggataacaaattcaagacatcatgcctgcctttaatgttcagattgaattcatgtcctctagcatgagtgccaaccacatcacttactgagctatctgtcctgcccttctttatttttatatcttttatttccttatgtttaaaatacatagatataaatacacatatgtatatatatcgataatcataaatcagtgtcgataggtgtaaaagtataaagatgcattctgtatgaaaacttaacaccatgtaagaaaggataaatgagtatattggagcaaagtttatatataatattatatatataattgaaagtaaattatcattaatctaaactgaagtgctgtgaatctataatgttaggtgtaatacttggaggagtcagtaagagagcaacacaagcattttaaaaaggaggaaaacggcaccatagtacaagcacttaccacaaatagtaatggaagggtaacaacccacaaaatgagtggggaacaaacagccaatgataagtataaattcaatcttattttacatgattttatataaatcttttatatatgatgctttttatctattttactcaaatggataaaaagcatcatatatctatatagtatctaaaataggcatacttactatttcaaattttagtaaaaagaattcattaaaagcaaaagaagtatgccattcaatctacattgaaatgctttaatagctatgcaaatgtaatttatcatcttataatcttagtctatcaaaaggagatagcaatgatcaataaatatgcacccaacaacaaaaccctaaaatccacaaacactgacaaggttgaagacagaaataaataatttaataaaaattatggaaaccttcaatatcaaatgtaaagattaaaagaccatgagggcaggagtgggtgggttggtgagtgggggtggggtgggggaagggatgtgggagggtgtttttaagaggggaaaccaggaaaggggataacattttaaatgtaaataaagaaaatatccaataaaaaaaaaaagaccattaggtgaaaagtctcaaggaagacatgctgcctctaggataacatggtctcatagtttctggaggacatttcctcctgaagtagcagaacatgagtgcttctcaaatatgcatggagcattgtcccgaacaggccataaaatatgctttaaaaattcaagtctttcatatacacattaagtatgtttccaaccataactggctcagattagaaagtagcaaaatatgcttcaatggaatcaatgtaaacaagcctagagatgcagttggcagtgatctagagtctgcgacattgaggcaaggtattgtaagacatctcttactataccctcatggctatgttctttgacagatcatgggataatctccaacaactaccatcttgctttattaataggaatttttaattcattttacttccagcattaggtttttcattctaaacatgtttttctgattgtagcattcttaacagtcccctaatttgaaggggggggggcttctttttgtcatcttttaaagttttacagtattctttaccagctaagaattcggccaatgttagtataattccaagtttactaattcttggtcactgcactggctttgttctgcttgtctctcactagtctggacagtatttatgaaaagtgtgattaattgtcaaaattttaaatttgaaaccttttaggtaaaactgtagccttttggcttctctggaaaatgtgaatgatctggcaacactgagtctatgatctcatatggtaccagctggctggcactaaacaacagctgtccctgtagatggactgggctctgttgcctgtagtcctcatatgtgttctctacacaaggacccatgccacttactattgttaattcaccactctgtttttcatatagaagagcaagaggcatgtgaggaagtgaatacatttttatatgcacagctatatcaaaatgggggtaggcaagatcagggccacgtttttatctgcaaagctgacaagctcagttcatttactgatttgctcacatttattatctaccctttgtggtcactactgtagttactaaggacacataggtgagggggtttggaataagcacccaaagtttacattccaaccatcctgtacacgtagtgctatatattttggtttatatgaacagcagcaacaacaaaagataacagtagtcttaagaccttcacaaagagtgaggatgtgggtacacagagggcggtgggctacctgattggaataatgttagaattcaggagtgagtggtaaggattgaaaggatggcaacgatgtagtatttggagtgttcgtttaaatagtttgctgggttaatgagaggctaccaggtcaaagggagtctgatttataaagagaaggcatatatttgcaaagcaagattacaagaccatttgaagaggacacataaaagatttgaaaggagatttgctcttgaatggaaagccacaatacgttcgagaagagaaaaagcaattgggacgtgtgcctgactgagcaacagcaaagagctggaccttcagtgttgtaggtggagaacagtaggaagaaatgaatctacctcaacagattcctgaaccatgcaggattatggggaatctgagtatgcagaatccaatgagggaagaatgtgtaggtgtgcacatatgggtttgtgtgtgggtgtgcaaacacccctgtgtgtgtgtgtgtgtgtgtgtgtgtgtgtgtgcatatgtgtcagatgagcatgagcgtataaacccccaagtgaccaacttactaccctctttatccaactacacaggaggtgggggtctcagaagctaaagaattggaaccataagcattgcagactaaggttaacaagagagtaaacacaggaatgatccaggacaccaaaaattgaggcaaaagcacaattcttatagtgattgtgagactcccacgttacgcctccctctccaagtcatttcaacacttgcagaacccttagagtcaggtgaatatcatttaccatgtgtaaaacaaaagtattctctttgggaaaaatagaatatatctagagaaataataactatatgttaacatttgaaaagtccttggagaggccacagctaatcaagctgagcagtaaagcatcccattggctcaccatgccaacaaagacagtgtttctcatcacaatcattcttcaatgggaatggctagtgcatgtaccagaaattcaatagcttcatagcttcctgaatggatcagaggagaaattattagagaaaactaacccagacaaagtagggatattcaaagatgcaggagttaaccatgtacttagaatatgaatatatatatatatatgctaatagacagtcctcgttgaaagatgtaagtctatggtcatgtgatcttacctagcatggttgatattgtctgaagaagtacacagtaagaaagaatgatgtccaatataatagcactgtcaaacccccaaatgttaccttgggataatatttagatcctaagagcttcaaggtagagagttggaaagagagggaggacattggaagcataatagaatatcaagctttcattacatgtgataagggaataacatggggcctgggatttccttcaacagtaggttttccataattatctccaaggttccatttggaagtatgcttgatgttgttgcttcaaccccacaagtacccacctttaagtcttaaatagtcccaaagagaaaagctaggcatctctggctaccatttttgttgttatgtttaactaagcatcagtacttaaaacaatacagtaattatacccagcaatttagtaaaatttcattagatacaatatctcattattagtacttacttggatggaattgatggaaacatactctctgttatcacttttagtagagctgagtataatattcaatgctactatcattaagtgcacggtgctttacttttatagtacaactacaaggttttgttgtccttaagtaatatactttcttatttgagaaaaaaataaatgaaaagcagctttaagattgcagtttcattcaacaatgcagaattctcacatccaatgaaaagaaataaacactttacccattatcttaagaaactcaaattcaggatatatggccacacttattgtgattgtttgtttgtttgtttgtttgtttccttgtgtttttaccaagaccagcatcttgacatcgagattaacatagaaggaaattggggccaatctttggcttctactatctacaaagactaatttttctagcgaagtgacaatccagctaaatcatatttaatttattgttatcatagcttactggaaatcaatattaggaattcatttgaaagacttaaatatggtaaaatctcttcagaaaatattccttgatttataatcttttaaaaaaaagttcttcctgcttttttctaccaaaaccatgaaggaagcccacttttattcttcctgattaatcactgctgttcaccccaaatcagtgaattctgagactctaccatgtactgtagccttcccacttgtttatatatccaaagctttaagaacaccatatcagattattacaaaagggggagaatgagaattaaaattacacagaaaatacagatacagttgcttccatatttctaacaacaaaaatgaataataaatcataaatctgttgggagtagctatgactgagagattacatctcacagagcctgatacttgaatttcttctctggccaccatcagtcttcctactacccttatttgttttcttcccatagtaagatatttcccaaaggccttccagaggaatacgctatagctgtcatgtttcgggtacgaagaagcaccaaaaaggaacggtggtttttatggaagattttaaaccagcagaatatggcccaggtaagctagcaattgatttgattgggtcaggtggttccctgttctgtgtacccaaatctggagaaaggtgtagtacccaaatattgtgctatttaggggaattgtcaatagaaaactgtaaatattgttaagtaggagagccttgatgatacacatgatgtgagaatctggtgaatgagaggttgatgttttgttttgtctcaaaggtttatttacttttattttatgtgcatgagtgtttgcctgtgtgtatgtatacatatacattatgtgcttgtctgatgaccagagaggtcaaaacagtgccggatccccaggaactgcaggtacattttttttgccaccaactgggtgctgagaattgaagcctgtttctctgcaagaacagtcattgcttttatcactgagccacactctaaactccaccccctttttaaacttagaggttgatattttatttgaagacagtggagctgttttccttttacagatactttattgactggcttcagttcattaattaaattcctgtcctctcatatatattattcttaaagggatttatttctttacttaaaattcctttgtcaattaaaagctgatatatcaatattggattcaccaataaaaacaaatatggaccacatgcttcatgctcaaaagtgatgagaaggaggaatttagggctgtgccaatggctcagtgtggaaagcatttgtcatgcaaaaatgtggattgggagctgggcggtggtggcgcatgcttttaatcccagcacttgggaggcagaggcaggcgaatttctgagttgaaggccagcctggtctacaaagtgagttccaggacagccagggctattcagagaaaccctgtcttgaaaaacaacaagaacaagaacaagaacaacaacaacaaatgtggattggagttcagattctcagcacaaacataagtgccaaaaggaggtgggacccacctgttagtctagccctcatgaagtggaagatgggatcgccagagcaagttagttaccaagactagtcaaatcaatgagctcttggttcaaaggcaagacctggagtgcacacacatatgtacataggtacatacacacaagcaaacatttgtgcacacaaaataaaagtaagtaaatcattaagataaaagggaaagcaagtcttctattcacacatcacatatatctaaactccaccccctttttaaacttagaggttgatattttatttgaagacagtggagctgttttccttttacagatactttattgactggcttcagttcattaattaaattaattaattaattaattaattaaattcctgtcctctcatatatattaaagggatttatttctttacttaaaattcctattttaaagtcttctatatcacatcatgtatatcatcaaggctatcctacttggggaagacatccaatggtaattggcttccgtattcttgtgcacaaatgtgcattatacctgcacacacacacaaacatacacacacacacatacacccatacacactcatacgtgtactccacatataggtacaaatatacccaagcataccacacacacatacacacatgcatacacacacatgtgtccttcacatatagggacacacacacccaagcaaaccacacacacaaacacatgccaaaagaaaatagagatttaaatagcagaattcctattcttatggagcagaaactctagtgggagaacatttatgagaacatagtgcagttatgctactgaggaatgcatgatgggagctgcctgaccataaaaaagagaggccaccaatatatacagcatggagaatccaggagtccttgcggaaatgacagtggagatgaagcagtagtgcaagcactccacagacctcaaaatacattcatgttctcttctatttcatgttctcttctatacataaccactgagcaccttcacctttggttgatctcctcgctattaatatatatcaccagcttatgatggggtgatcatttgaactgaaaaatgcatgtcatctatgaaatatcttctctttgtcatgaaagttattagaggtttaaaaggtccaggtcagttttcattcaaaatgaaatgcacataatgtttttcttctgaaattagggaccatgatatctatatatacatatagaacgatataatcatgtttaggtatgtgataatattacccagtagtataatttaaaaccatgacttttatacttcataaaatatatgcttactttatgaatacataatatatatgtaaaagaataacacatttatacacacatacactcccttatatgttctttttgtaaatgagcagaccactagaaatgcttcttgccagcatacttgaatcaaggcactaggtttttttgtatacaccaatgtagcaggcacaggtaccatcccatggttagctactgtacatatggagcatttatttgtgcactttactaattttgaacttcaattttcaagccatacgaagatgttctccttatctgtcctattttttcagatatctgtagtgattgatggtacgaagaaggtggtagaatttatgttccgaggtgctgagggagatctgttgaactatgtttttaagaatcgagaactccgtccactctttgatcgtcaatggcataaacttggcattggcgtgcaatcccgagtcctttctctctatatggattgcaatttaattgcaagtcgacacacggaagaaaagaattctgtggattttcaaggaaggacaattattgctgcacgagcttcagatggcaaacctgtggatgtaagttgtatcactaacgctaacagggagctttcaatatccctaagataaagcaaaatatcttacaacagtgactcctgggtctgagaatgtggttccatatgtagagtgcttacatagtctgcatgacacaaggggtgtcatctccaacaccagataaaccaggagtggagtggtagttcatggtgatatgtacttccaagccaagaatcagaaaggtacaggcaaaagcatcagaagttcaggtcaggaccaatctcagccacattgtgagttcagagttagtgggctacataannnnnnnnnnnnnnnnnnnnnnnnnnnnnnnnnnnnnnnnnnnnnnnnnnnnnnnnnnnnnnnnnnnnnnnnnnnnnnnnnnnnnnnnnnnnnnnnnnnnnnnnnnnnnnnnnnnnnnnnggagggagggagaaaggaggagaggaggaggagaaagggaggaagggaggggagagggagggagaggaggggagagagggagagggggagagtcaagaagggagagagggaaggagggagagaaggagagaggaagaggagggagaggagggaaggaagccatctcttcttttaatgattgcacacacaaaagacccctctctcatcaatgtttatattgttgtgtatgaagaatacttattttcgactgtatgtctcatatataactatattctactttcacccacatttttcagtcagccaattaaaaaaaaactggatcatgcctttaaaaactaagattattaagagtaacttctagtgagaaattggaaatatgacacaaagaaagtataagcttgaccaagcctttatgttttgaataaaaggattagaaaaaagatgaacttaaaatggttccagactatctgatgttttcattcaataacaatagccaattcattcaagctctctatagcaattcaactgcatttcccacaagttataatgtctttttagaattcctttgacagaaaaaataaagtcattaaatctatcagtgggtcatttggatgagaagacatggccagaaaacctctttcagatgaaaatgtcctttaaaaaacttacattttgaagctaacatgatataaatttactgttgattttcttacaaaataagaccagtaatcttctaagagtgagatctagttaaatttaatagcaaaacattttcttatgagttaaatgataagaaagtccctaaataccgtgaggagattaccaataataaatgccaaactgtaaacatgaggtgcaggcaatgaaattgcatttcagaagtaaaaccctgtgccaatatgccttgggagaggttgtccttcctaaagattgcttgggagaaaaagatgtatggatacagatacacattcaaggaaatatgattttaaagcatttttctcaaagagacactgtatgaacagatcagaagattgtctggatttggaccagagcagagcagcctgtcctagggggtccatgagggccaagggagagattgctggcttgagtcagaatcccagctggagtctgttaatgtgttagtatcttcagtgacaaaataattgcttgttgtgatagtatacggttggaactgtggtttttttttattcataatctgttctctaaaattagaacatgggggaaacaaagacaaaaacaacaacaacaaaaaaacctattgttctttgttttcaaaaccttcgagccaggagcaggactaaaatctgtcaataaatggtgggtgttacaactgatctatcattaatcataggtcacggccacttattttctatatttcatcctgttttgattctcttgtgagccattatccaccatgaaagtagcttctttgatgagggttgagaactgtactcatcatgagtacaactataaataagtagtattagattgaaatcctttaaaattgacaatctccctttagttaattaaaacaactcctaggcagtgctgagcatggtgtgacagacacatgatagcctttcagtacctggtgtgtatgtgtggtatgtttgtgtgtggtgtattcatatgtggtacaagtgtgtgagagtatagacgggtatatggtgcaggtacatgtgagggcggagcagaatagtgggtgtctgggattctttctgtgtcatttcctgcttttgaacctagatcacttagtgagccagaagcccaggttttcagataggcttgcttgacagtgagtactcgggaccacttgtctctacctccaacagctgggttatattaagacacagccatgtcaaatttttgacacaagagatgggaattcaaatcagaatatcaaaactgcagagcaaatgctcttgccactgagcaatcttgtcagcccctatttacccattattttgatagcaatgagtagaataaacttcaattataagttgcattagttaattataatcttaattctttatattatccataatttgtatcctctctctagtattttattaggctaagtattgtacttaagctcttcaaatgaaaattcatctcaatgaccttgtaaaattcctataagttatatatcaccgaatcttgaagatttttgtcttacccatagatgtgaggctgataataattccgtaagttttctagaatgtctgatgagccaaatttattttgtcactctcagtatagtgcacattagagaatacctcctggatttcatggtgtgtgtagcatgggggcaagttagagattcacagctagccagatgtctgttttctataaccacagatgaactcttacaacaccataatttgctttttctatataaaatacatatctattaacatcaaagtaatgcaaaaccaagatctattaaattgtcaataaagaaccgcagagaaagggtcaggagaaaggagggaagaaagtgggaagagagatgaatctgatcatgctatacaccaagtctaatatatacttctttgttaattgcagccctgaattcacaacagtaagctaagttcaagactccagtcaatgtttgctataatacagtgttacttaatatttcagtagtctaggagttgaagaagatgatacaaacacttatcatattgatattttatcagtaataagcaccattcaccatttcctagacaattgttctgatcttatggctatctttccattcatctcttgtctaaatgccaaaaacaggagaattttctgcagatagaagagacttttgtaaaaaaaaaaatgtgaatcctttgttttttgtgttattgagacaggattgctctgggaagtccagactggtctggaacaccacatagaacccagattagtgaagtttacactcctcatccatgctaggactgcaggcaggttctcctgggttcagcttttgagtcttgctcaggatcgtactaatataaagtccataggctttctgcagacttcattaagtacaagcaaaacctaattatcttcttttctctttattgagaatggcgcgtttacttcatacctcaaataggacccttggacctaaagagaaaccattttccttcacctactcatatctttgaccacctctgcaaagtttgacttttaaatgtaattttatacagaaccacactgtagaacacagcagtatatcgctaattaaatatttgtggggtttttgttaattcaatatttcattcttattgctcgagacagttagccaagctttgccattgtttttcattaactcatttcctctgtctaatgatcttcctctgtagctgtttctcaagtaatccttaaagcaaggaatcctaaattaaaattaaacgttataaatatgtatcagtcatttatattaattttccttttatttctatttaaattgctgtggttaataacgcctaaaattgattctcaaaaccaatgacatgtgttgctacttacttttaatagatcgaacttcaccaacttagaatctactgcaatgcaaacttcctagctgaagaatcatgttgcaacttatcacctactaaggtaggttaatttccttgccatgtgaaacacaagcagtgagatatatttcaattggcattcgtcatctgtaggttctatgtgtaggactttgtgaagcatctcagttgaaactgggtgagtaatttattctccgtatggagccattcttagaaccagctcaacacttcaaccacagggttgcacactgaaatttgatggtgatttgtgctcaggttggtctcagtgtaagaagaaccagtctttttgtttgtttttttctgagacagggtttctctgtatagctctggctgtcctggaactctctctgtagaccaggctgcccttgaactcagaaatccgcctgcctctgcctcccaagtgctgggattaaaggcgtgcaccaccactgcccggcgagaaccagtcttaatgtacaccttcctgccacccactgtacctgttgccttgtctcatctgaggccccagctgattggaggtgctgtcctgggcatcttttctccttcaaaccactgcacaggaggagtgttccatttcttgatttgtcagctacaaaatgaaaggctttcaatagggaaaaattattttttaaaaaccctcctcaaaataacatatgaaaaccaaaagtccaatattcaatgaattgtttctttggatcttaatttctccaaatttttacacttcctaagaaatctatatgaaatttttaatcagtgatttttttttcaatttaaaaacccttgtaacttctttcgtgtggtgtgtgtactagagtgaaatctagccaaataactcagagtctttcaaatattatgccttgcttatataacttggctatataaagcatatctcaaacccaatttacggatctcattccaagtaaagtgaaagtctgccaaatatctttctttaaatacctaaaaagatagctcaaatgccagtctacagacctgaaatactgaggtttcctgaacctatacctttaatcatttttcttatttcaaaagtgtattgtaaatcattatgaatgtgttatattggagttcttaaaataactattttctttcacttaaaagtaatgtaatgatgtttttatacttataagttttatattcttcttcattattcattgccttatgttaatagattactatgaaaacaggttagaatagaaatggatgaagaattggatgaagtaacaagtctgacatgacttcacacaatagtttagttcacagtgctaaccttaaattttaataaaaagataaataacaatctttacaagtattatttgaaaatcaggtttacagttgaaaataagttaagaatttagtccaagtatgtaaaaataaccaaacgatattttttatgttgatgatcatttgtgatgatcacatcaccatccattctgaaattaaaagtaactagaactctgatacatttttacaagcaggaatacataaataagataatcctaaaagccattaaatacagtggatgaagatttgaaaccaactgtcttgtatgctttttagttttgaaaactgtcttaaagggggctagagagatgtctcagtgtttaagagtgcttgttgtatagccatggtgagctgagttcttgctcatctcttagccctgatactatagtgggtgggcaaagacaaaacacccctgaggcttgcaggctgctaccctcttctaagactacaagtgtgtgtttcagggagagaccctactgcaaagaataaggtagaatatgataaaggaggacaactaaccccccattgacttctgtgggagcacacaggtacacatacctacacacatatatgcacaccacatacacataaactatacacatattgacacccacaataagtatattcataaacatataaatgtctaaatccaaaaatggcattatatctgtgcatttatagctacatattaatattaaaccgcacatgctattttcatgttaatattttatggagtacttcaaagctgaaatttattccagactatctatagacatgttccacttctaataaagtcagattttcagtctctgaaacaatcaaatgtcacatgactgagggtataaagtaaaaagtgcataggaaataataaatcattcaggagaaatgaactgtgtagcaatcttgtttcatttgaatataattctaggttattaaattgaaattttattaagataccaaatgattattaaatatagaggcgattaacatggaatctctcgtttcaaatatgagaatatggtcacagtgtgtctgggtgtgaagtttattgtgggtcttattgttactacaaatattagagtgatacctattattcaagagtcatttatgaattctatttgagaaaatgcaggaagggaataaacatcagatatgaagatgaaaataatacctaccgtgggctcacaccacagtagcaagccattgactttttatttgcataacttgaatgcagttttccactcatgtataatttgcatccagtgagtttttccatctgttgcttcatcttcactgaagcttcaaataaagagttagccatggggaacagcgtggtatgagttgtcagaacaagaagataaattggaattccctttagaatcaacatgtgatacttcctctatatttaaaaatatttattatatctctgtgtgttgatatgcttgtatgagtgcaggtatagaagagatcatcagaggttagagtaacagctggaggaggtctccagatgtagggcctgagaacaggacttgtgttctccacaaattagccctggcttttaactgctgtctctccagtctcctgcatgaaattagagggggaagattctgcctatttatagccgtgttcagcatgttctaaactcaccaggttcagaatcctccacttttacgtctttaaagaacactggattagaatagactatattgtaattagccgtcttagagtataaaataaattcatttccagcttgacttacacttaccaccagcttgctgcagtgcctatattttaccaaccaaatttatatgcttttaaacttttgtttgccatatactattcacattttgcttgtgtgaagtattttattggaagaatgtactattattgatatataatatcactatacttatcataaggccacctaatgtggctttaaaatttctcaataatcacttttcatatgctctttgtgtgtagtcaacatggttaagtacactgcaggcttagtgatagagtaaaaaatgtaataaacttttataaatggttggcaatcttggttactaagaaggaaggatggcaggcatccagacatctcagcttgatgggagctaactgcaagaactgacgtcattctctaaattctctttggggattttagtgtccagagcaagacgactttggaagtactacttcatcctgggggacctctaacactggtaaaatgtcttcatatctgccaggaaagcaggaacttaaagacacatgccagtgtattccaaacaaggtatgtgagctttcatatgtgcccactaaaaggtcactctacacagtggcctaggctccttggctgtatcctgtggtacacagaaggtgcctcatgcctagtcaaatctcagatacaatacagtcacagagaaggaccagagaaaggaaattaaatattgcaattttggatatttattttcctttcaatgtatgggagttacaattaatagaaagttgagaagaaatacatagtagggaagtgttgcacacagaacacattaggaatgggctgcagttcagaaattcagttctagatggaaagtgcctgatcttcaacatagacactcaaaaaaccagtacaagtatttctctttgctgcctagtgcctcaatttgcacagtgtctgcaaatttccatccagctgcctctttcctattaattcctattaattgattgtctctgggtggcatatccaattaatgagcttcatctgaaaacatatagttctttgatcagtgacactgggcccataggcctctaggaatatttttttatgttcatagcagtcatggaatggagtctctgtctctgtctctctctctctctccctctctctctctgtctgtctctctctctctctctctctctctctctctctctctctctctctctcattacttttgctttggagcaatgaaacagaatgattgtgacacaggcattcatttttccccctcaggaggaagcaggattaccaggaactctcagatccattggacataagggcgacaaaggagagccggtaatgtgcacacaacttgtactgttgggatgaaggagtttgctcaaatgtgatttgaaaagatgtgtccacctcatctttatgataaatgcatttcaaaaaggccctcaagaaatatgttgagatgaagatctctgtaaactagtgtcataccagcagctgagtctcttgcttaggacacaggtttaggaaatcctgagaaacctacaacagccagtgcttgtacctgtaagttccacacaacactataaagcaggcacatatcccagcgactcccagctttcctcgtcacctgcttctccagattcctaggaaacatattttccttgtctactgatgtgtcctcactgagtaggattttaatgcccaacccctactaagtatctgtgggaggacctctgctctgtgggaggcataatgctgcacatttgaagaggagtaaagaataggataaattgtttgtttcctgggatatcactcccaaagagagatagatgttataacttttagagcctatgtaagagtttgcaaaggtcctgagaaaacaatctgggcaccctaggaagaattgtgtgctcttgatctctcagtgtacaacacaggccatgactcatgcatcaagatttgtcttccttttgactaagctctaactaagctgtaatattttctagtcttttgaatgtgttttccaaccaatcaaattagggacctaatataacaaaaatcacatcagttgctggagccacagaataaaaaagcacaaggcctgttctcattgtgtgtaaagtcttgtggtgatgtaagtcaccccagaaatgacaccagtggaaagggactaagaggaattagtaaagacgacaaatgttagaaaattaataatacataaggttcataaaatattttatgcaaagatatatcttagagttgcaatgtgttgtaagactcccatcaatatgttgctttaaactatttaatttggttagaattcccatacataaaattcacagtgaaattttagtgtcatgtcaaatcaattggtatatagtttattagtaatctactacacaaaacaagtacttattgtacacttctttaattttccccctttgtgaacagtctcaaaaatctgtaaatttgattaaaccaggacagctactgctgtgtaaaactggtttcagatgaccatgaccataaacacaaccaacttttcagaaacttgtaatcaacatgaacatgtggtttcattttaagtagtgatgacattttaatatgtaaaaatgtaggctttccccggtgtttgattctggtataaaattttcatagttctaacaggtgcccagactacctgcattttggaaccatcaaatgttactttaagattgggcagattgaatagttaccattatgaaatgaccaacatttcaaagagtcactcagggagacaggtgttactacagaggcttgcatttgggtattaaatacaaggaagaatattcatggaattagcatggagtgctggaatgaaaatagccttggtgcccaaagtcttagagaatatctcttagtggctttgattcctgaatagtatccaatcaatgactgagtgtgaaagacaacactgtaacacatacaagtcacttacattatagacattcgatggatgtgtgttttcctcttctttctattcagtggggttgaaagagaggtcggactcagcctttacagggttttatgttctttcatttgtgactcgataaaacacaattcttcagttatgaggcaatgtctaacaatttccaattgattgagacgctcagtgcataaaagtttggagttagtttatgtcctttgataaataacaatattgcattaagtttctatcttcaagtatatgaatattaaattctgtgttttgtttccaatattatctggccttttctagatagtggttaccagtttatgaatgtttctttgaattttaactagatcataatggattcgaatttgtggacattagataagaagatcagaaaccatttggacatttttataatttacattttctcataaactattagatacagtttagtagcctttggtaaatttgagtttttgaaacaatgagaatgaacttgagaaaacgactttgaaacaccttttctaattatttggaagggcgatatttctataggtgttatttgaaggatctttactgtaatgtcacaaattaataaaggcaaattttcattttttatttgtggaaagctattaatagttaaataactaatcaggataaaaatgtaagcaaatccagtttcatctggtccaatgtcttctaatgactccatgtctctctgaagtcatcgcctaccctctcacatatacttcaaggcatcacatagttttgtaagattgcagctaaaaccttgctgacaaacatgcagaataatgagttacttgtgccatttttactcaggtatggcattattatcatgttggcccctcattacccaccctggcatctgtgtcccctcccaccttttctttcctttcccaaagagccccctttaaaaagctcctaaacgttaatgttcttgaacctacatgtggtctgaataatttggaaatttattttcaagtttgctttcatatcattctgcatttccatgtaaattccccaaatttgctgttcatgaaaaagttgtttagcaaatgaaatgatattgtatattcataaaatttcaagcgatagagccaagctctagtgatagaggcactcatttaaaaagtaacattacattccaccatttcaaggatagatttggtggactatttaatgatgtgggcagtatgaggaagaatctgaagcatattctttggtgcccacttaagaactcacttgggaaatgctaactccttttgatgttaacaattaatgtaccttttatgaatgtctaatgaataattcaggtgttttagtgtatagctggtggtaaagtcgaatttggcaccatgggcattcctggagaaaagatatgctgactggctatttgattaaccttagtgcctgttttatataaagctgagtcaggcaagaggggaaaatgcagaacttttatctcttggggatcagtgacccttagtccattgctagggctgccaaagatacccactggaaggttttgtaaatgaacttccagagaaatacaaactcacttgctttttctgttgttcaaggctatctttgagctacacaaacagactaaggaactgtggcagaggctacaaggccagtgatgcccaaatataaactgcacagctctgtggaaagaatgttttcctcaggaatgtaaaaaaaaaaaaaaagtctgttaacaactgggcttcttacattatcagttttatggctgatacagtaccttaatattttaattttatttaataatgttataatttatataaaattacataaatgtgtataaaatatatgtaaagttacatatatcaaatcatttattataatacagactgcattttatagcaccgtgtaagatatatgactaacaatacaagaactacatttaggtctatcaataaaaggatctgatttaatatctagataatgaaatggctgctttttcgatttctcctcaaatgccatagggttgttgtgaataattgcttccctcacaggaggttaattctgaaattcaaagtattacctggagctagcatggtggttcccaccagcaatggcagcactcatggggctgacagaggagaaaagtgaaattcgaagccagcctgggctatgctgcaagattctgtccccaaacatgaagaaaatgctaatttttttcacgcaatctttataaaatttcacatttgcgtgttaaaataattagcttatctttactatgcatattaggccaaactagttagatgtcacatgttgatgctaaagaaagactttctttaggaaagtaagtttaaggtgagcaggagagtccctccaccttgttatctttaagaccacgaccctgtggtgtcactcatatgatgctcccacaggcttaactgaggctgcttggtaggtcaggtgccgggcagcattttgtgttaatgtgtattgtcctcgttgtagttgctgttttgttatttttggtgatagtggtgatcaaacccaaggtcttgtgcatgctagacagtgctagaccactgagctctgtacacagcacttgagaccagtacttctttttttcccccccattaatttatttattcactttacattctgatctcagctctcacctcttctcccagcctccccttcacataaccatttcccccatctctcgcacccttctcctctgagaagaggaatgaaccccttatttaccaacccacctggcacatcaaatcactgcaggactaggcacatcctctcctactaaggccagacaagacagcccaacaaggggaacaagatccacaggcaggcagcagagtcagggacagcaaagactatgctgcacttctgtttcatctgtgcagtgtatggagtggtggtggctcatgtgtgctcttcggtgggttggttgtgttacaagaagaaaggcagattcttagaaaggaaggaacatacagggcaagttgaagatgcattagaggaagtcatcacgacaacagtcagtaatgaatattactgagtctctgtatttcaggtcttgtttctttccctagagcaagctcttggaggcaggatgctgaataaggtatcagtttactttgatttctctgtagccaggttcacgcaacttcagagaccccacttcatggctagtatcatcctagtacttaaagaaacacttgtctttgaccacatcctcttcccaggtggtgccagctctgctcccaaccacattatttagctgtgaaatggatttaacgctcacatgtgggaaagaattaccactcccagggtggtggcctcactcttataatccaaggtttatcacttatttaaaatcatgctaacgactacatgcaaagtaaagttaacaagaaagtcgctgttatgttattttgtggtatagctgatatatattgcaaagtatttcattctagggaagaaacatcaatcttttaaacttcaaaaattttaaatcacattgtagttagtgtttcagatagaatacttctcttgacttctaataaaaataccttatttgatttttggtgctttggatgtgagcataaactttccttaattgctgagtcatctctcccagccctgatttttataaataaatttctaaagaaaattattagttcacaaaccttatgtgattaaatgatgagagtcacatatcttcacagctcaatttcctaaatttccatccggtattttttttattctaataatttatatattttttttattcagtttacatcacaatcacagctctcctccctcctctcttcccagccccacccttacaaatccttctccccaatgaccccctcaccctgttctcctcaaagcaggggaggcccctctggggtaccaccccaccctggggcatctagtccccacaggactaggcaaggcctctcactgaggcccaaccacgcggttcaggtaggggaagcagagtccatggcagggaccagggaactgtcccattctgcttgttacggaatcccacatgaagaccaagctgggcatttgctataaatgtgtatgggtatcacaccttatgaacacgtggatgccttctgtgtcacctaaaaagcatcactgtgcttaactaagttacagccctctcagtacacatgacttgttgaaacatcttggagcaagaacacaggcaacctgccacagaacacacacctctagcacattatcctcaagtggagtgcttttatatttaagccagaagttgatttatgaacacgcaatgaggcatattctgagcagcattaagtagagtttgcatgctggcttcaatttatattcccatacaatatgatcctactgtaataaattaaattatatgcatgcaaattttattgttctaaaatagacttgcactttgacgttcggtgaaatgatagcagtaattacttttaagtgaagactctaaacagagtagtagttctccacggttgcctttttttttggcgacagaagcaaaataatatactatgtagcactgttttatgacatgtacttttggaaatggagtcatttggactttaaagaggaggaattatagcaaccaattaaattcttttacaaattaccctgtgaaccagtgcacacttagagtaggcattcaccgctgtgtacacacagcttttctgtcatccatcataagacagccactatctgcattacactgatccagcacacctacgaattttcccaggtttgataaattagctgctgtacattcatcggggaaaattccattctataaagaaatacctgtttacttctggtaaacttagacggtagtgaggagctactgccaatagaacggataagtggaatggattggtttccaggagaaatgaatgctttaatgcccagaatcacacacccacacataataacacacacgcacattcccacatacacttgcacataaacctttccaacacacacacgcacacacacacacacacacacacacacacacacgcacgcacacaccatatacacacaggtactttgtccttctcgtctgaagtgggaaatggctgaggatctgaagagtggatgaatgccctgcaaattcagctctagagtgacacttgccctaactgatgcatgtttcattcaagatttgtcatattccctacttcactgatgagccagaataatgtgcattgtttgggggcaatgtagatacttttagaaatatgattctttaccaataatatctattttaattatgtgatcataaaaaaataacaaaaatagagcctaaatcatgctaaagtaatatttacttgccgaatgactactttattccctaaggaaaatctgctttatgagacggggtgtcaccttgtagcccaaactggggtggaactcactaagcaggccaggctggcctcaaactcgggaatcctcttttctgtcagttgagtgctggtgttaaaggagtgcaccaccacgccagccaggaggaagcagttattaaactacttttcttccttatgaagtaggtagaaagccaatactagtcctcagaaatgtgcctgacaataaacaagcagagttacactgcctggatcagggttctaggacaaaaatccttctcctttatcaaatgggaattatagtggacccacgttagcctgatcttaaggacagaatgagaggtttatgagagagccaacttaatgactggcagaaatgtttaatagctagaagacacattttaaacacacagcttgatgatactcttgctctaagctctggcttactgtgagactaaatcagaactcactgaagggaatttattttattcaaaatttatttagcaggaaatgttaaaataaaactcaaatatcttcggagtgtttggcctttttaaaaacaacaacaaaattaatgttcctagaccaatggacccatccaaaagaattacacacagcatcacacgcttgtatcatgttgataaaacagctgcttaaattaatcctaggtgctaagcactgccaagaccctcctcctttccattagctaactcaatacttacagacactttagctcagatttgtttttattacttttggattaagaacctaatatataaagacaattaaaatattcctaagtttcatagctagcgaggagtggagttaggagtgaagctctgcccacgtgaactcattgttcatgtgccttcctgcagttgcatcatcaggatgctgccaagttccctgcttccttttcacactctgttagaattaaatcacaaatccattttccttgcagcttagggagcagattgggaagtccactctctagatcctgctgtgtctctttaagtctatgaacccctttaacgtaagatcttctaaccccaacacgggcagaagactatctctgaagaattactacaaattagttcattcagtaaatgagaaggttttatagttttacctccaggaacaaacagactgaaaatatgatggtttaattttttctgtttgtcaaatttgaaaagagatttgaaatactctcatagtgtccagaggtgactccagagacctgtagtctgctccccatgggccacagcccactcacgtctgctgtctgggttgacctgaacacccaacataagacattctacctttacacccattaccaaacatgcttttgatgcatggccacacatttctatacacagagtactacagagacaatagcattaaacgcacttacctggcattattaaaataacctgtaatggtaatgacacagtgggtcagttgctaatttgcctgtcgtaagaaaacagagagactgcctccagtataagaaaccttgaagacaacaaactttgtcttcataaactctgagctcccattcactgcactcaatgtgcagaaacgagactttgcactcttcattatctctgcgtttcttctcttctggggactgaaatgatgctttttgaatcttgatattttccctaaaaaggcatttatgagaacactccagctccaggaaataaaggcagatgttgtttcagtttacgtacgtgcagacgagccctgtagctgtcgtgaatcctaatgacttctgttccagcctggtccagatgtggcgttaatgcctcagagactaagaaacttataggcatttagcaaaaataatttttgtttaagtcatttggcttcctctgtgcatttctagtttcacctaatttttccatggataatcagaattaagctcatttccacagtttctccctaagttcataaaaaaagaaattaatatgtatttgcacataacaatttattattgaaactgaaaccactaaataagaacatgcaactttatccaacagtagaatttttttagatttaattacatttcttccttcctttcctccctctaagctctctcacataccctccttgctctctttaaattcatagtctcttttttattgctattgcctatatacatatgtatattcatatactgatatattcataaatgtaaactgcttagtctgtgtaatgttttcaggtatcaccatttggtattataaaataatcaatttgtgtgttcttcctcagggacaactatttctcctgctctcaacacccctcgttgcctgcagttctttctgtaggtttgagggcacatgtgctctcccctgttcactttggcatgtttgtcaccttcattcagctccctttgagtgatacatcattttgtcaaggctgataaaatatatgtggaatttatgttaacaaaaaaatcattgtttgcatttgtatcaatactgccaattataaatgtgctttctgtaagaccaagacaatgaaatctgaatgttttattttatgtttccactaaactaataacagtttgtagggttatcaaattagctatatattcaacttggactttaccaaaaaggaatcatctgaatgcctgtgtcttttaaaaaaattaataatgggggtctcatgaaatctaataattaagcaatattcatagaaaaataatcaaaaaattatagtttcattactctaccttctattcctgactaacatcccaaggctaacaggaataatcggtggaaaactctggcttgaagtggagcgtgttggcattaccttatcagtcagtgcgtactgatacaatacagctccaaataagcagaaacggaagaagcacagaggtaatagagggacaggaaaaagaaacctggccactctgcagctgactttatttctcaatggtttcttattccctcctaatgccttccactcacatcccaagtagagcagttggcagggagcacaacagatggatgacaagctcagcacatgcagcgactctggcaccaggcacttgacttttatttaccaaatagttaggcagatctcaggaacccagtctgctaacacccctatttggtttaatgtgcaatcggtatctagcacataaatatgacaatattactgggagaaaaatcactgattctttacatagttcactggctaatggtcttatttttggtatagattactaacatagtgaacagtagatttaaaaacataactgccatcatttaagaaatctgtgactgtggataacagtcttcctgaaggggctccatcagaagcatcgttcagccagccaagccaggctcaactgtaccagggtatggtgatgggtatgactatcatgtaaaaacgagagattggagttcagataattgatatcttgatctcttaccagaatcttcacaaatgactaccttcaaagctcaggcatgtttttatgaagccttctggtctaccaatcaaaactgcaagcacgtccattctcctaacttagtattttatttacatcgccaagtgtgtatgtctgtatgcttgggagcacctagaatagaaggaatcataactctcgtatctctgtgatgcctctgcttggaccaacagaggatgcccaggttgatagactcttcgcaagttcaagctgaactgcacagaactcaaggaaacttcactccaaagtacaggagagaagtaaaagagaactgttggacatctatgttgagggaagagtgagaaaggtactttagtaagtaagaactcccaaggttttatgcaaagcagacttcagggaagtagtggggaggagaatgtgtacctagcaaagcttacaagtgaggtttcctaggatgaaatgtaataggggcagtgggtacagctccagagcttgcttcccgtttccccatcacctgctctccctgcactcttttaagcaagccttactgccagtctgaagctaagttacccgatggctttagcacagtgaggctccagtagaggtaactgatacggagtcacgctatcaattactcatcacgaggaatactctggacaggaagtggtttgctgcaactggtatcttactgtccttaattgggagctgactgatggcgctgtgttctatatcttaagtcatctttcatttggtggagtgcttgctgtgggtgtcaggaactgcaggcatcagatacctcaacagatgattcagagtaaacaccttgatttcctaccgtggttttgcagtttcagaactatctacactgtctttaacctactctgacagtaggctcaaacctttctttctcacataaccttcaagaagatcatcatatcagtttcataggatcccagaattttattaaattctacaaaagtggctgggtccccctaactccactaggtattcaagaaaactttcaccacctctccaaataattcctaaattgtttatttttttttcaaagctcaaaataactgtcgttcgtctaatttggagaaaggttagaacttgatttttttctttgaagaaaaatcttagtagtgcttatacttggttacatactcaatatatgcaaatttacacatttttagaagcaaattacattaatagaaaaacaactttagcacccaaaacaacatggtgtgtgtgtgtgtgtgtgtgtgtgtgtgtgtgtgtgtgtgtgtgtgtgtgtgtatgtgtgagttatggctccatttttgttttgtttgggaccacatctgacatattatactgagttctgaaagccacattttaagagacaggtatgctcagagagcaggatcatatatttagaaactctaaactatggctaatgttttagtgaatagaagccttcatagtgacccaagtggatgtcctgcttaagatccagaagtaagaccaggaaatgatttaggttcagaaagctttgattcagtaagcatagatgtgtgtttctttcttttttttaaatttgtgcttcacaatatgaatcagacagaaaaattaattagaagcttataatagtaagctttggtggcaatggtgaatatgagactataaatgcagtttctgtattatttaatttggggagtgagtatgtgagcagtgctcatggggaggtcactggacaactttcgggagtcagttctctccttccaccatgtatgttccaggaattaaaaggcttgtaattgaaagaatgtccccagaaataagttttgaaaggtctgatttgtttggaactactgattgtatttttttccaattatgaactaaaatgttgcttggaagatagaagagaagcatcttatgttttctttaggactagaattggggggaaaggaagcaggaactcacacgcacacatgtgcacacgcacacacgtgcacacacacatgcactaaatacataaaacataaaacagatcagttccctttcaatagcattggggagtactgattttgtgggcagaaccaggtttaccctggctgccagccgttctctgggctttgctcctatatttcagaatgagcactaaagtgactggtattaccgacataatgttttagattaaatttttatagagccaacacttggcatcagcatgtttggactatgtcctcttgaagttttcatggtaattcatacacctccctcctttttgatccttggtgggagccagtatgctcactctcctctggtggactaacggcaattagaagtgattataagcctctaagtagggaaagaggcaagatcagttaacatttgccgtagcggaaacctagtacttttaactacaggaatcacagaatgtcagctaaagacacatcggtgccagcactccaggcacatggtatgtaaaagcttgcagctagctaagctatcagcactcctttttctccgaaacgggttgctggcagtgtgaataccgtgtcattgtgctttggaggattatatgtggtatctggtgatcctgagtaacttgcaatatgatataaaatattatattggatcaactgagggaaataatctgcttcttagggacaagtgggcatacttcagtgatgagtaatgttagaggctccgttaccatagaatgttctttggcatcagatactaaatgcgatttccttatctctttatcaaatgtcactgcagctttctactagtcttgccggtgcatcaggtcaagaaccatactaactttcaagagaggaaatgcttagtacactgataattatgctattttcgatgcttccacatctaattacatatctcaaccaaattttgcctgtactatgataacagcagttatactatagagtactttgatagttaaatcaacaaagaaaacccttaactcttaaaagaaagtgtgtgcatgtatctgtcaatacacttctggtgaaaaagaaaaaaaagaaacagtaaagctttccaaaaatgtattagtaataaaattaagacctcattattgaggcagagtatctcattgttgtcttaaaatgtgaagatgtggtgtttctcttcatatacttaaacttcctttaaataattgttagaaatgatatctgtgttctagataatccttaagaactgttattttctaagtgaattttctaaatattttacaaaaatagagcagatcatattttaagctgcctgaatctcgacactcaggagccagagtaaattcctagactcaagtaaacgcctgagggtccacggagaatgtatccaccctccctgaagtttctctttctgggtggtgtactattcacaaagcagacttgtcagagcgatgaccaagaattccagtaatggaacctgataggcatctgctaaaaacatttacgcccatgacaggagccagacaagtggagagggaactgtttcatgcagaattgccttggtatgcctttagaattcagatcccagtaatcaacagatatggataacgaagtaagtattttcacattgtgacaagaatatcaagatgtacgtatatatctcagattaggtaagaagatacctataaaccacaattaaattggttaccagggaccatgtagggaagccacaactgaagggctacacccccatcactgtgtaacagtctatagaagatgattatgagaatggtaactctcgatgaatttgttagcaaatcctacccaataaaagcatttactcttgtacacaaggaaaagagaaggaaggaaagaagaaagaaaatattgaaggaaggaaaaggaaggaaggagggaaaggggaacaaggaagggaggaagagaggaaggaaaaaaggaagaaaaggttagattattaaatagcatttggaacacaggatgtaaaaccattgagcacttacttgaaatgtcaggttatactacaagttggataacaataagactgatccttaacatcccagagcctccatacactcccccattcctttaccttaaaatttgaggtgattgccctgtacatgtgacatgacagaaattggaagcccagatgcacaagagatatccaggagaatgctacctttcctcatactagagggtgcccctttttgagggtcttttacagtatcatttgtgactaatgacattcattttggttactctttttagggtgaacatggcttagatggtactccaggattacctggtcaaaaggtaatgagtttttgtaaatgtttctttcaaagtaagctaataacccagattttcaaggaggattcatagaagtctttccttcttggagacccttcaaggaaacattcattacagtattagtggcatgcttccccaagaatcagtagttatgctttctaagaaccatgggcgacttagaggggcaccagaaacactttgactgttatcagtcagagtgaaaactggaaaagtatttttctgcagctgtttcctatttgcacaggttgcatttctcagattggattaagcacaagtatttataatgatctaaactttctggcattacaaggatgctatatacacaaataagctcttcaaaacaaaactttctttgctttggcctgggtagtgcagaccaatcatcctagctacacaggagacagacacaataatattacaagttcacagcctgccagcctatagtgtgagcctaaggccagcttggacaacttgataagatcacatctcaaaatgaaaagcaaaaggaaggctggaaacagttcggtgaacagttcttgcttagccagtaggaggccatgagtcaaccgcctacatgggaaaaacaaacctgcagaatgtcacattcatattcatcatgaatgagaactttaacaccatccagggtgagtctctcagtgcctgagatctttctcatcaccaaaattcatttcctctctattctttactatctattcagggattgctttctctggaagcaaacttgactgtttgtgccaagcatattgaatgcacagaaactaatacactccagattccaagagggaagtggagtaactttaggtggggccacctgtcatgatacaactcagacaatctcaccttgagggagagcatcattggtgaaatttcagatgtcccctcaatgccaaacatgacattacgttccagtgacgtgttaaccggttttaaaggcaaaatgtctgaaagcactacagagctaggttttcttatatgtagttggcaatgtcatttgaaaagatacacttctatgtatagttacagcagcttttaggaatgtttccttacatggccccttagagagaatgaggttagattgggaggcatgaaatggcatgctctgagtgtcgtcatagcagttctagaccaagcccagtgggacagcatgttctgtatcttcgagtggaggtgcaagccaagggatgtgcggatttatctgctgggaaatagttttggactttccagcagctgtttgtggtggccacatctcattctgacaatgtggctgaggcactagggacatttaacagcttcaatgtcagcttgaattaccagatggagttaaattctatactttaggggaaacactattaaaagaaaggtagtcccatgcacctatgaactaatctattgttttctgttaatgttttgaggcaaagtgaagcaaaaaagattatttacttatgtttcaaaacacacatatattttaatgtgattgtatttgtatgctaataagagctcacactcttaattaatgtagattttaattaaatcacatgccactttatggaggcattgaaaaaaaaagctgagatctgaaacttttcacctttagctacatatgctggcatatgtttatttattatcccagcaaataatagtaatggaggtaggaagatctggagttcatgaaaggccattgtgagctatatcatgagttcaaggacagcctggtctacataatatcttctctcaacaaacttaaatagaaaaataaaaggaacaaatgaaaatattggtctcttatgcctgtacactcagaagatactggctggatgccttagaccatgaccctcagtgggtgcatggcagatgtgaccatctctaccactcatctcacagctatgcagccgtagctccctggcatgtaggagactttcagcatttactaaattttttattgtaatgtgatcaacctatttatgtcaaattaaatctgaaaataaacttatgacattagaaaggaatcaggtgagcaagagatgctggtaccttctagatttgaaggacaaaatagagaatgatccctctctttgtggctgtgagttgcatgagcaggacagagagaaacctggggctgcaggcaggtggacttaggacgccaaggttcacagctaaatccacttactatgaacttctcattagatgctcattttgtggaaggtagatctcaaagaagtctgtcttctatatttaatgagatgctagtgagagcaagaatgcaaactcagtctgtgccatttaattcaattttcaaagcaaatgacgatggtagaatcctcagaagctaacttgtgggattcttggctttatgaggtgaaattttctagagggtagggaagtattcagaaagctgttcctttagtattttgcattattcagactttgttttgtttaatattggcttggagcttcacatctcaaggaactatttaagtgagtgattatttactgttagaaatatcaccattattatgaaaagtctatgaactgtaagtctgttcctattactatacaccatgctcttcatttacagggagaacaaggacttgaaggcatcaagggagaaattggtgaaaaggtattcctttccatatgcatttgtaaggatgaattatgctcctgaaatagcttcatgtgacatttagctcctaatattctataagacacatgaaataattttatagtgatgctaaaatatttgcatcacttagagtagtcttagtatattggtgattgacagaagtagttctaaacttacttagtggtcaagtttccttattaagtgtatttcatttatacgtaaaagatgcaaagatttattgagcactgtatttttatgttatggtgtcattggtccactatggctgatgactgactaaaagattcctagtatggacactggtcattggatttctttcctgggggtaggggtggggtgggattaagaaagcaaaagagccaactataacagaaaagatacactaccctaagatcagaattattccaaaagatttaatggagggacggttagaaggtatgagtgatatataagaaactcagaagactttaaagtgccttgggtcacattacataagacttgttaatgccacgacgttacagatccagagtcagagaaaagtgtggtgaaggcttcgggcaggggctgaaggaagccctttttccaaagcagtcagtcccaagtgtgaaccttgacagaagaatctcactctgccctgaactcttgttggctaagcaagcatagccagtcgggtggatgtacccatgaacatgggtaccctggggctcaaatggtggatggtagttctcgagggggcaggcacagatgtcattcctgtaactcaaggatcatcacaccatcctctcacaaaattgaactctgcattttatacctttaagcagtgttatattttataaataaataaataaataaataaataaatgctaaagacatctcgtggacctcaaaaaccatctaaacaaccattcttttacaaacttacagcttcagcaggtggggtaaatgatgtcaaactagccagtgttgcttgcttatgtttaccattcttggcagtgatcagttatttgcatcttctataagtatttatagagacaatgagcatcttccataattacaggacaaattacacacattgtaagcctcatgataattacttttcttcactgaagtgagagagagcaccatataataaccatgcaattgagtaaaaattccattaaaattacaaccgttaaaaagggtcttttagaaatctcttgaatatatatatatatacatatttatatatatatatatttgctttagaataatatgtattatcaggccatgccttttggacttatttacatgtatttttggttccttagtagtattatacttgtagaaataaataaaagtaagcaatgtataatatgctttctataatacctttaaaatttggttattttgttattctttgaatatagctgatgtttcatggtaataagtggattcccacagactgaacatgaatgaaacatattatgtgtatgcattacaatgctataataaagtccattatgtataattaatatgttaatcaaacattgagaaaaagcacatattcagtgtactttgcttctaagtcttcccttctgctttctcgtgtatattgactgtcgatccatttatctgaaaatttcatggtttagtttgttcttaacatctgactaaaattctgttgtgtatatgtctcacatttttccttatctgtccattagtgaatagacatctaggttgattgcagttcctaggtagcaatgaacatgagtatataagtatctctatattagactataacgtcctttgggtagctgtgaacagctaccactaatgatagatatgagccttgcatgtgattgagccaagtcatttatataatgaagcttatcttaaggggtggttagttctccccaaaacagttatttatcagataggattctctaagaagacaggttctcttttttaaaatttacaatgccacatgatagctcataactgtaactttagttgtagcacctgctctctggcacctgcaggcaccaagaccacatgtgttgtacataacatacatacatacatacatacatacatacatacatgtaggcaagacatccatacatagaaaggatttaaaatgaaatggaaagtttggctctgctaaacctgttgtaaaattccagacaaagaaacacagttgtatccacttactgaaggcatatttttcctgaagtgcagttggtttagatttactcatgagtgatatttattcatgagtggtcaatctctctctctctctctctctctctctctctctctctctctctcacacacacacacacacacacacacacacacacacaaaatactaaagtgaacaagattttcaaatctcttaattttaaaggtaaaaattagttctttttggagactgtttgagcctgggggtgttgagagactgcagcacccaaatcatcctccagccttgagtgtccacgatgaactggttatagggnnnnnnnnnnnnnnnnnnnngcttatgggaattgcctgtttttcactatgctgtttgttgatgttttctgctcccccaagggttaggctaataacaatgaagaagctactaaaccaacaaatgcaggctcacactctcttaaagtcactgctgaaagactagaccttgtaaacggctagtgatgtgagttttattgtcctgctgctaccagagtcgtctttacatgctgaaattccacaagatatatgtttgtaagccagaaaatcatgtttagcccactattcctctggttttataaacgctgcatggatattttttactagagagtatctgctggaaaaatacttcactgagccccatttctagttggctcccttaaatgcacactatttaattccatgaaatgtgtaacattcaaataaataaaattacaaaaatgtatttataatctagaactatatgcctaaacatacatgtacatgcatatgtacatattcactttaatatttgaaaactgtatagattcatttataattaagccatgtgttcaaacattcataatctttaaccagcaatccacatcaggcaattttcatgttatataattcaaattttcagatgccagcttcaaatggagtgtgtgtgtgtgtgtgtgtgtgtgtgtgcgcgtgtgcatgtatgtgtgtttgagtatgtgttcctattgttgattctattaatgttgagttcacttgtattagttacacacgcaggaggtttgtttctttctggtggctgcttttgatgtttcagtaggaaagacagacaaagcttaatggaaaacatctatgcacttggattggccactcacgctgggcttgcgtcaagtgaaaaggcagtattgaatccattctcgctgttctattgactagtatttgtagaaggaaattgtagcagcatcttcaggttctatgtctcacatataacaatgatatgtaaatgcaaagctagtaagtggggtgggggtgaagttggtagaattttgtccatttatatctgacagattattacatatttaatttataaccaaacttgagagatgagataatatttttataccagtaccagaaataaatatcactcgtgaataaataactcacacacttacttccaacagtatttatcatgattatacctaatcaggaaatcaatagtaattatttgcccccccctaggatctattacccagaaatcgtgatcaccttagcctattgtttatttaattcttgacatgttaaaggcacaaggaagtcgaggaactgaaaagaatccatgagctttggccacataaaattgaatgagaaaatagcacaagggtaatttatgcaatgtttattatcttttctttgggacattctacagcagaattgtaggtcactcaatgagtctctttacccaaatggagaagtccacactagctgagacattgtacatccttgtcagtgtctgctggtgtgtacaccgatggtaacggtgacgaattaacccacatcacctacattttatgtaacagaacaggagcacgtgcttccaacctacccagtagcattccaaagagaaactagattgaccacctcttgcagtacccatggcagcccgtgattggcgtaaatgttcctgtatgctgctttctagatctagatcatctctgctatgctatttgtgtgttctttaccgtaggcatttcctttataagatactcaattcctatttaacaggatagttgtaggaatttaaagtatgtgtaacaaataaaagctactctataaaaaagtgattcagcaccgggcatggtggagcaccttttaatcccagcacttgggaggcagaggcaggcagatttctgagtttgaggacagcctggtctacagagtgagttccaggactgccagtcttatacagagaaaccctgtcttgaaaaacaaaaacaaaaacaaaaaaagtgattcagcaatagccaaactatgaaacatatacaaaatattgatattttgagagaacaggcttgacacaattaatatctttagtttttaaattttcacagtgttaactcctaaatttccttgtaaacaagcaagcaaaatattcaagaatatcagctcatgtacaaaaaaattactccaaaccagtaccagtgtaagataccattgatatgtttagcatgtttttgcatgacttagcttagtgattcttcagtcacattgatcctgtctgctttgttcaggtattacttgcatgctggcatgttggctgagggtagctagtctacgctggattttaagacactgtgtctttattctagatgcacactctctttcccaaagctatcatagacttttctctaggccagggtccgaaagaaagaaagaaagaaagaaagaaagaaagaaagaaagaaagaaagaaaggaaggaaggaaggaagaaaagaaaagaaaagaaaagaaaagaaaagaaaagaaaagaaaagaaaagaaaagaaaagaaaagaaaagaaaagaaaagaaaaccaacaacaaccacaagccatttaagaccttttgaggctccttcttcagatctagctggcctcatctccacagggttctgttaaaaaaacatacaaacaaacaaacaaaaaaaaccaggtcctacacacagtctgggttcgaaaggtgtgatattgcacccacccatcttttggttgtatggatatatgcaggaatggcaagtagctagatttcataacaaatatagcacaaatgagataaaactcttatctgtaaaccagtggtttagcaaagttgcttgatttaatactttgattgttcacattctctcataacctgaagtatattagtcattcttagtggggtgtacagactatgaaaaaagtgtattttaaacttgattgatagtacagctttgtatgtaagaccattgtagaaaaaataaactcattgtagtagtgacagaaaggtgctcattaactacatcaacgaattgcgttctacttttatctaatgtcacatgcattttaattttagtcacaataaaattgttagaataaatggaaaatacacatcagaaattaattgtatttttcataattttactattaatgctgtcttggcaattatacttaatatttaatattcagaactaaggcaaggttgctaaattctgttattacagtgaggcactttgccatcatcactacaaagtgaccgtcaacctgtcaccttacttcctgtgattttcctgtagttcacctcatggagttctcctgcacattagcctgatatagaattattccatttaccctgatcatgtgcaaaacttctccaaattttagtcaggactcacgtgctccacttgacagctgacttgaagcaagaagagaacagatggggagaataactataatttcaaaaatcagagcaatttatgtgtggccgctggaaattggtatgggagcaaccatgccaactttcaattatgcacggtgataggcaattggagctcaggaatggcagtgccaagtcagaggcttaacattagtcagtgcagattgtatgttatttccctcaatcctaactgtgctgttgaataaatactaacatggagtacagttaaccttcctttactcattattaatacagaaaatggaatgttaaagaggcatgcatatacacaaataagagaatggttttcatgagcatttgtcttttcaagtattacttcctatgtccatatattgtttcactatgtgactacacattattttatttaatgattccctttttggaaataagtcttttttttttaatctgttctttgtgatgttgactaaataattttggtgtggggattgtttcattgaagactaataactatcagggacaaagtaaagagtccactcagcatcctctatagactgggatgtggagcactgtagcaatagtacatacaggagctggaggggcacttgtttactgcagaggaaaatgtttttgcatcaaaaccaaagaatgatctttgaaagaaaatattctaaacaagatatgggccaagaggaaaggatggacacactaataggaaatcagaaaaatcttatatgccctaaggactgtcaacctaaagctggtgacatctcacttttaagggatttccactaaaatctacatggtaaaactgtcaccattgttatttaacagtaccctggaattttttgagcagtgttgattttacttctaaactacgtataacagaaattaacctgtttgtttgtttgtttgtttgtttgtttgtttgttttcgtctgcctgaacaccacctaaccctaaagactcaggggtcacatcttgttctcaaatccactcttcaaaactgtggccaatgaatctttaaaaacaattgtgtggctcccatttttaaaacattcttgagtttcccactaggttgaggtccagcccttgtggcgtctgacctacactttacccctagaaccccttttcccctcgcaccccttcttgttgccttttcttctttcaattcttcgacttctccagactcttccgttttgttcttctgttgtttttgttttgtttcctgttgctgtgacaaaaacaacccggttacaaaattccaggttacagtccatcttcgtattggacatcaagacagccagaacttgaagcagccagtcatatcacatccacattcaagagcagacagcagtgaacgaatgtgacatgcctgtgctataccactcttgcctttacattaccttcaggatctcctgcatagggaatgagtccgctcaggaggggcaggtctctccacctcaatcaatgcaatcaaatgaaccctctacagacgtgcccacaagccaacttgatttagacactttctcatcgagattccgtctccagattattcagccattacactttgaaggctccttttcctgctgtcataatttttaattaaacctttaacactataactcacctgtgattacgtatcatgatttacaattagaagttcctggcatgtgattttctttttccttcatgctcatttcccctcaggcaaatagaaattctatgacagacaatatcagcctaaaattttgtttttgtctctaatacctaatataatgcttagcacataaaagaacttaattcactcattaccaccaggaataggtacacaaggcttagggtttcttttcatcttcttaaagtatttgataaatattttgatgtacggaatatcctgtttttcaaactactgctattaaacttatgaggcagagttacatgtatatagtgtccatatacataatgttacatatacacaatgtatatgcatatgcacttactctattatattaattctatatgtcttactgtaattacattgaagatataaaacattaatatattcagcagtatactaaaatatgcacatagtaaattgatttaaaataatccaacttttattatttacaaatcacatttggcaggaacaacaatctagctctgtattatatgtcaaaactatagagtgcatttaataccagatatgacactgtctcttaaatttaatggtaatattaaaagttatctaccgaatcctgtgctgtcatattgaattataatcatggcagaattgttagctgttaactgtagcgaccttaaaatgcttttattaaagaaatttattcattcattattttgcacaatttgagaacagagatatgaaaatccggggggggggactttaacaagggccaagcagaagaacctagaccttattaataggttagaaggatttggctaatctggtggtttccctcttgttttgactttcactctagtgagcccagctctttcctcaggctctgagctactcaggtttccctcctcctgctctggcttcaggttcttgctctcacatcctgtgctacagcctttgtctgccctctgctgcgtcttgctcactccagcttcttcattcttttcttgacctctaccccttcctctacacccagtttacttctcgcctttcccttacacccgtctatgagttcctcctcagatactatcatttctagcaactctaaaaagatcattttaatataaatataaatgtatgagttccttggcaagtgacttgaaagtgttttcacatcaaggaaaaggatgttattcagtcctgcccctgttaccacccctgagcttttttgcatctcagaagactgaatccagggctctgcacaagctggggagctactctatcactgaattgttcccccagttcctattcttgaacatttctgaataagatcgtgtcctgtgtgaagagtgaggtcaaggttgtctttaagttttatgacaatgttctagtatataaaagaaaactatgcgatttaagatgttttaactggaatggattaaaaattacttaatcttgtaattttctcagccagaagtatacattattgacagaatttttaggacatcccagatgctagacaggtaacccgtgtcacaaaatattagttagcaggtgcattgtttttttatttaaaagccactgtcttgtaaacttctctcataataattgtatgaacaattcacagtataacaactgctgaaaggatgtgtctcaccaaaatagcagaattcctgtgcaataggcagagacactgatgtagctgctgtactacgtgaggtgtgtgcactggctgccgtgtgaggcttataatcccggcttatgaccagccttcgcctcttactctaatatcctcaagaaactatcttcagcttctccgtgtccctgatcatcctcacaatcccctttaagccatacagctttaaataggagaggaggcttaaagaaacaagacaccgaaatctgttaatatcctcttccattttctgtccttttcttcattgtctctcactgtctgtctgatgatgatcatactgcatggtgagacacaaggacaaaaatgatacaacagcgatgcttggggcatgggtttcacagaggcttattttacatacctgcaacagtccaaccaagggggattggagcaatgcagctggtgttagctggctacattccaggagcacaatggtagggagattgcctcccacttaaggttgcttatgtgacctgatgattcatgggggtagtatcctagtaacagtgtgacaaaggcatagggtcgcaccctgtaagtgcaggttgaatcatttctttcttagttaacaggaaattagatggtcacctacattagctctcactgtttagattctgttagcccccatagaagatattattttgttgttgttctaagtcaaaatctcttattttgattatcccatctgagttctgaaaaccctttagagagttcaagacagctgcaatactttctggtacattgttaatatcttggtattgcattgtgcttcattgatatttattttttaaaaataatattttttacactccatcttccattccccacccccatctaccctctgactgctccacatcccacacctcctccccaccccacccccatgttcatgtggataccctcccccccccccacctgacctctaaactccctggggcctccagtctcttgagggttaggtgcatcatctctgaatgaacagagacctggaagtcctctactgtacatgtgttgggggcctcacatcagctgttgtatgctgtctgtttggtggtccagtgtttgagagacctcgggagtccagattaattgagactgatggtcctcctacagggtcacccttctcctcagcttctttccatcttccctaattcaacaacagggatcagaagcttctgtccattggttggatgcaaatatctgcatctgactctttcagctgcttgttgggtcttctggaaggcagtcatgctaggtccctttttgtgagtattccatagcctcagcaatagtgtcagaccttgagacctcccctgagctggatcccccactttgggcctgttgctggaccttcttttccacaggctcctatccatttccatccctgtaattcttttagtcagaaacaattatgggtcagagatgtgactgttggatggcaaccccctccctcacttgatgccctgtcttcctgctggaggtgggctctataagtttcctctccctactgttgggcatttcatctaaggtccctcccttgagtcctgggagtctcttacctcccaggtctctggtgaattatggaggtccccccaacctcctatttcctgaggttgcctgtttccattctttctgctgatgctcagggcttcagtccttttctttcacccaataccagatcaggttcccctctcccccagaatctccatcctggtccacttttcctccaaggtccctcccctctccccaattgtgattgatttcttttctctcccaagtgggactgaggtatcctcacttgaccacctcagcttggaccttattgagttctatggactgtatcttgggtattctgtacctttttttttttcctctagtatccacttatttgtgagtacataccatgcacctccttttgggtctgagttacctcactcaggatgatattatctagtttcatatatttgcatgcaaaactcaggatgtccccattcttaatagctgatagtattctattgtgtaaatgaatcacattttctgtatacaatcttctgtcgtgggacatttaggttgtttccagcttctggctatcataaatatggccactatgaacatagtggaacatatgccctgtggcatggtggggcatcttttgggtatatttccaagagtggtatatctgggtcttcaggtagatctatttccaattttctgaggaacatccagattgatttccagcgaagttgtaccagctttcaatcccaccaggaatggagaagtgttcctctttctcttacaggctccaaatacttcttgtggctgccttctaatgctgctataccacaccagatactgatgcatttcagaaatagctgtaattatttttgtatgtgtacacgtgtgtgtgcgtgtgcgtgtgcgtgtgcactaaataacccaggcagtgtaatatatgaacagagccacaattcagttccaactccagctaatttcatgaatatctcaaagtcttcacctgggaaaatagagaatgaggctgtgttgcctcatctagagtcacgagtgacctgacataaactctcaaaatatggagggattctactactgtcagtttatgatcttgaaccagaatataagcatttatatttataagtggtcacttctcttttggatctgtggtcttctagtctccttgtatgctgtttactgtgttctattacagttagcaccttttttcattttgtaatgattgtgaatttcatacacatgaattctggtgacttaagtcactgatatgagtactgaatagaaaaaggcttgccactgtctccgaatcctctttctgggaaacagccaaacatctctgaagatagtattgctgttgaaccacttttttttttaacctcactggcatttaacatatgcctctcaacggatcctttgctcaatgtctgactcaattaaagaaagtgaaatcacaacatgaaagttttgttttagagatcatcttgctccttataaattccttgaaaccactctaaaaactaattcaatccagatacctgccaaaaatcattattaaattatttttaatgtgtgtgtatttttaaaatgaggatgtatcattgtatcacagagctgcctttccttcaagattcttagaaactcgtgccagtgatagccatggactctgagttatctgtccttcatctgtgccccctagcttgatgtctgccttggtcccaggggtctcgagctacagttaattaaaaggccttcgatgtcaatgaaactcagtaagatacagaattccttcaagacacatgctgggctttcaaacatatgtgtttgttcaatcacccattcattcatttgatcattgaggacctactccagactagatactgtgttcagcattaaggtaacatgaaagggacagaacctcctctcaaggaacatgtgcgatgtgtttcaccgtggcttgtataggatcccattgaaggaagagaatggagcacacacactgtcttggatggaggtaaagttaggtcaaattttattcattagtgaatcctgaagggaaagtaagatttctctgagcaggaagagtcagatgaaagttcacaagttcagtgcaatactttttgggatgtgtagggaacctgatggagtctattgtgtgtcaaaatggaaagcggtggccattgcaagagaaataaaagctcttcagaaaataattgaagcacagcttcaggctgaatgtccaaaagatggtgaaagaagaaataccaaaataccaaaaataccaaaaataccaaaaatacaaaaaaagaaagaaagaaagaaagaaagaaagaaagaaagaaagaaagaaagaaagagagaaagaaagaccaaagaaataacatcagagggtcatttggagcatttgattcctgatgtctttagcttgctttcctcagtaaaggcaccatcagaccaccaagaaactaaccaccttggtaaggaatattttgaggggaaacttctcaagagaacgcccacctgaaggcttccagacagatgattagaggctaaaagccctttgaaagccttagggcagtattagcaggacttttgttaagctctctgtttcttctcaaaatgcataaaaactgaacagtttagtctagggaggagaacaaatctgacctgtagtataagcttattctcctaaggcaaaatctttaggcaatggtataaatccaatcaattaatcatccctttgagtaagagagagagagagagagagagagagagagagagagagagagagagagagagagagggagaaggaggaggaggaggaggaggaggaggagaggagaggagaggaggaggaggaagatgaaacatagccacttcttttatgaatcaaacacagtttggtgttggttgtcaagtgttgtggtgagttactgattttacctgatagcaagcagatacagttactcaacaataacaacaacaagacatgtaagtttcagcagtcttctggttaggtgtctagtctttaccctcagtcttgctcttctgtccgagaaacctcagggattctgtgttacctctaggaattggtcgacatgttattcacaagtttctttgctgagatttcatcttggcttttgagaagtaaaagatttcagacataactatatttagcaagttgagagggagaaagagacaaagagacacagagagagacagaggcaggaaaacagacagacagagacacagagagagggagacagggagagagaccaagggaagagaaagaccagcagaactatgggaggggtgcatgttagaacatgtaaaggaaggaagaagaacagagaaaaagactgctctaccttttatctaatacgtgttttttcaaggtgtgtgtgtgtgtgtgtgtgttcccacacatactcatatgttggcaaaggtattgaacagagcacatgtggagaccagaggccagcctttcgtgtcagcttatctcttccaccttatttgagaccatttcttcttctgtgtactagatctcctgtcccttgagtttcagaggatttttctgcctctgcatcccatctctccttaaagagtactcctatttcagatgtgttgtgtcacttctgcctttacctggttctgggagtatgaaatcaggaagtcctgtttgcacggcaagcactttaccctgtgagccacttttctagcacctaatacctttcctttgttcttttttcttttcttttttgttttttagtatttacatgacatacataaaattttatgtttcaatgacaaaaagataagattaaatgtagagactatgtttaaaaaatcccatacctagtaagaaaatgtggaaatcaagaaaatgctgattagaaaatatagcaaatgaagtaaagttcgtttaaaaaaaaaatcaatgcacaggaaaatatctacaaacccatgggggaaggcagatacaaagctacaatgagggtgcattaatacagattaaacagtgagtttaaagaatcaaatgcaaaataaaggaaaaataaaatagaaataaaaggaataaaatgaaaagaaaaatagaaacaaaagagcagctttaaaataaattagtaacaggaaattcataagcatggttggtaaaatctatgaaacgacagccataaacttgtagaaatggaaaaacacattaaagctagtttactatgtgagcaataaaatgaatgagtaaaattcaggtaaacagacagaaagtaggaaaaagaaaaaaaagacaaataaggaacagaagaggtgatcacagatagtaaatggacgaaagagtgtggggactctaacatgtaccctaaaagagcaaactggttaacccgaaggacgtgtacaaacataatcaataacacctggaaaatacgccaatgttaaaaactatggaagaaatgggagaagcagctgaaaacacaccaggggatgaaggagcaactgatgttctgagttggactttatggacccatatttaaattgtatttaaaacgttctaggacaaagaaaagatagttttcaagaagttggcatatttcaaccccacagctaatgagaaatgaactaaaactagattctattcacaagcatatatagggatgtatttaaaaaggctccagctgatagaattgaactgttcagcaaaactcagatagcacaagattaggatgcccatggagatgcctgctaaggaattaccaagtgcacttcattaaccagttaaaatattgaaactgagttgtcctattgacatagactgaagctttggataacatgaagtagtcactgttaattaaatccttaggtaataggatctaataaaatatctttactgaaatccaactgtaaatactgcttgtaaaaagataaaactactagaaattgaatatgtgaagctaatttctaaaggtaaagttttcatcgcatgaaaattaaataacatgaatttgaaaaaaaatattaatatcctcactataaagtcagttttaagaaaatttcagagaacttgttaaaaaaatacttatttataagagaagttaattcattaatagaagatatattgaaaattgatattttatccaaagtcaacatgcataaaatgataaataagtgataaagttttaaaatcaataataattaggaaaaatttgaggaaaagacagaacacttgttaacacacaccaagtatagaataaactctaaaggaatatacattgaaactactctccaaaatgacaataagttagttaaatgataaaaattaattcacaattaattaatagcaatatcaacaataaaaatagcaatttcaaatgttttcaattttttttaaaagttggatactatctcctgaattttatatgcatagttaatgaatgaacatagccatttttttaacaggggcagggggagaagagaaatgtttgtcttataagacatcatcattatggatttatttttctttataacattccgggagcattggttattaatgttggtgagatgggtgacaccgtgtgagcttattattattacaatggatggatggaaccctgtggaggttaggacaacctttcaggttctgttatttccttccaccacaggtcccatggactgagctcagctccaatcaggcttacacacaagggtctctgcccactaggataagttacctgccaaggatatcagagcactcttcatttcatcttaggcaaaggctgagaagcacatcatactaacattccataagatttctgcatcgctgtaaatattatatcacatacaggagcaagatgcagagcccagaacctgctctctctcttctatgaatgaaataacccttacgtttcaatcaagtcttctataaagactctggaagtgttgaactttttcatatgaaggataccttacttccaacaaaaataaatttcaaatggatgaaagagttaagcaaatatcaaagcagagtaagtatagtgtatttgtgaaaactaataacggggtatgcataccaaaatataaaaagaaaatatggaaaaaatgtttattgacccatataaaaattgaacatggcaaatggtacaggccattattaaccaaaatcaagtaaaattattaacatagtaatgacatttgctgtttccagaggatttttaatttttgaggcaaaaaaaaaaaaaaacaaccccaaaactgagtttttaaatgtgtaagatatatgaacaagcagtcactaaatagcaacttcacaatgttaacccagtaaagctagagcttactggtagtctgtgatgtgtaatttaaagcaattatgagaagtgacttaacacccatttggcacctgttgctgggtggaattcaagggcaaaggcgtgcccatgcactgctggcggtatgtgcagaactatattctctctgggaaagcaatttggcaacatctgttcagaaatgaaaaatgcataagccctttacctagcaatcaccatcccgagaatcctactactgtgaagaatgtcacaggcaaacggtggtgtttacggctttaagaagtagaaagctttaatgcaagtcctaatggagccagctgaattcaaccatttattaagatctgcacagttggcccacagatgtcataatataagtatcacctattatgtatacagtacaaactgtctagagagcttccttgtggggaatgcattggcgtttattgcagtgttacttgcaatggcagaaagctggaaagtcaatgttcttaacaggaaatgatttaatacattatagtatagctctattatagaatattatgaaaattatattacataatatatattattcattatgcattatacattatatatttacatttatatagacatatttatgtaatgtttaaatatataatatatatgtatatatgtttatatttatacatttgtatattatatatcttgctatataatgatacatattatatattgtatatactaatctaatacattaaataatatataatattatattatttgttatgatatacaataatttataaaatagtaacaaaaatagggttatgactacatgagtaacacaaattaatgtcatatgtaatgttgaaagacaatataaaattataaaactgtaagcatggaatgaccatttataatggccaattgttttgaaaatgaagactatatatgtgtatgtgagttttcataaataaactggaaggatatacacctcattaataaaaatttgatatcccaatgagtagatgccattttaccattgaatgtgctggagatagagttcagcaggagagtgctaagggacctgcatctgagatgcagctcagtcaaagtaaagaaaagaaaagaggtaaatagtgaggccataggaatgattcacactttatcttggaaagatgcatattatacataaattatattttagaataacggttaaattcataacaattactatgtatatttgtattatatattcatagaatataagtgttgttattcatatacaaatattacataacattttaatatctgtattagcatatatatttgtatataatattcatatatatgttttaggtactttttttaatggtacaggcgatcaaacataaggccttgctcacagtagccaagcagtctacttctgagctaaatttctttcctggaaagttttataataaaaatatagcacacaagaaatgtattgatgactggaaaccagcttagataactgctataatgatcaataataaagttgaagcacaaatatgagaacagtaatagcaatgccccagtggcagtgggacagggaagtggcagacactaaagtgattgggaatggagatgacacagaaagaaggaaatgaaggaagaagtctctaatctgatgctgtacttacttattctccatttgtgtgacaatatgacactgcacaggtaactcgcctccagtgagcattcagaaagaaacacacacgtactagctctttaaggttgtcttgggcaaatcagtatcttagaatttgtgtatgaatttccaaattaactggtcagtgtgagctctcacatacaacctgctgaaattattaaatgattagttttggtgtattgttttgttttgtttttatgtaagtcaattggaatttatcttacaatatcaaatcatccatttcacaatatgcatacttaaattttttgtcttagggtttattttttagttatgtgtatgtatgtgtgtttgtgataatgagtacatgtatggtgctgtcaatagaatccagagacactgggttccctggagttgagtgacaggcagttgtcagctgcccacagtgggtgctaggaaccaaattctgggtttctgcagaaaagaacattatctgctgtgttctaagactgtgagctgtattgctagcccaggctttctttattcttagtaatatcttgtcattttcactatagaggtaacctttgctagagttattactaggtgtctggtgtgtgtgcgtgtgtgtgtgtgtgtgtgtgtgtgtatgcccccaggtgcataagtggtgggattaatgaggatatgaaggttgtcttctttcatttctctccacttcatttttgagacaaggtctaagactttgtaggtcactgtgtgtcatagatagttccaattatttaccttgaatctgggaagacagaaccacaattgaaaaattgctttgagaagcttggcccatgagcctgtgagtatgtctgtgaagcactgtttaactgctgagagtattaactcagtaagcagagttcttttatggtctcaggttcagttttgccacctggttcctgccttgagttcctagcttggctttcttccgtggtggactgcaacctggaagccaaataatgctttactccccccagggtgcatttgttcagaacacttactcagagccactggaaagcaaactagagagagtatcatgccatagaaacaaacacttctccaattcctttcgagttcctatttcttaccactatgcaaaatagtgtatagacagaagtctttaggaaagcggtgcagtgtagatctttgccagttttctacagtcaagagggagaatttaatatttaatgttctttattcacaaggttcaaaccataaagtataccccaacacaggcctcttcggggagaattcttttcaccagcattgcaaaacttattcctttctgttgaaatcttaatagtacaaggttcaaagttacgctcagcctaagttctgcagcaggggagtgttctggtcatcacctgcatcaccacacgttctgaagtggcaagacttgcaaaggagcttaagtcacaagaactgacgagaaatggctgatgccaagcgtgaggcgatatgatctgtggtctagaacaagtggcccaaggatgacttcatcactgttacaataggaaggaaggctgaggggctgctctcatgtctcatgtagacccatttgtgagtgacctggtcaggaaaactaagactacttacaagagaatggtaagagtagaagcaggagtcacaattgtaagattcaaacaaaattcttaaatagttgagcggaagctgtaacagcgtggatcctggaactaagttccatttattatttatgaacattttcaaacgttcagcttacgttgctttgttcagaaaattgtaggaattcctttttttcaacagctcactaaaaaataaatctccctcgagagtctttgaaagtttggatcatttaaaaggcatattattaattttactgcgttaataaccattatgatctagtagtgaggataatatttatcatgggacatcttaaaatgcatattatcataaaatgcataataaggactttccacctatataaattgaagttaatagattgtaacagctcaagtgggcccagtagggtcttctgaaaacctggtttaggacctagttaaacatgcattcctttcatgtcatattttagagattttgctctacctatattcaaacttgaatatgtttgttttgtttagttgtgcaaagataaaaatagaaaaatatttttccagtacattagactacaaaagagaaaaagagattttttatggttaatcttattggttttagttttaaataacacacatagaaaaatgtctattaagagtaatagttactgtacaaaacattttatgacatattgccatgcactgagaaaatcctttttttttgcatgtcacagtgtgagaaagtatgtgtttctgtttaagctgtagttattgttaattaccaatgaatatactttaatgagaagcaccagatataaattatactcagcgtctttcataatatggcttgcagattgcctacattgaaacctcctggtccactagatcagtagcagctatatgccttagaaatttaagcagtaccctcagagatcccttcacaacaacaaaagattgaagagcagtggttacctttatctatagttatatatacacatgcaatgcagggaatacctggggttacgtctataatgaacactgcctctccctcttccaacagactatatgcttctactcactgcacagtgtatgtaacacatctataaacattaccctaggtgaaagtatcacaccaggcctagtattagttttctgcattcaaggagccatacccactttggcatgcatgagaagtcacctagctttgtgactcacactgcaaatttggacacaattatcttctacatattctcttctaagattcaggatctttggcaaactccattttgatggatcaaattaaagcataacaccaatgtccactcaagtcctgtggacgatcagtgactatctgaatcatcatgctatgcctacataaacacacaaacaaaaacacaagaagtctaaaccctgccctgtcctttcattctgcaatattcctcaaaaatggaattaaaatgtcaaattatatgatgttgaaactccctaagtattttttattctttctcatgatagaactgcatgcaatatctccaacccaattcaataaaatttgtacatttctgtggccaagacacaagactccactagggttctgtgttctcttgaaaagcttaaactctgaatcttgaactaaaatggagccatgactcatgtcacctccacagctcaggtaatatagtcagaacataaagtagaattttatgtatgaattatcaagataagatctgtttccactgtaatgttgttgttgcagactagcctttctctaatagatcccagcagaaaattagtagactaaactgtccttacagagacaaaatgaaggctaatctgaaccatttgagagtgttcttcttttgtgaaaatgcctgacatttcttagacatctctacaaacacaagaagtttactgagtactgtgttatacaatcaaaggaaataaaaaagaaatagataccagcatgtgtgcatgagaacataccattgcttagaagaaacaaccaccatcttcttctcccatggatgttgtttttgtgtgttggttctgtgtgtcaacttggcacatgctagattcatcaaagagaaaggagcctcagttgaggaaatatctccatgagatccagctgtaaggccttttctcaattagtgatcaatgagggagggccccatccattgtgagtggtctcatccagggctggtagttctgggttctataacaaagcaggctgagcaagccataagaagcaggccagtaagcagcacccctccatggcctcagcatcaactctgcctccaggttcctgccctgcttgagttcctgtcctgatttcctccaagaatgaacagtgctagggaaatataagccaaatcaaccatttcctccccaacttgtattttggccatagtgctgtttttgtttgttttattttgttttcattttgttactattattattattattattattattattgaaaacagattcttttcttatacaatacatccagaccacaagctcccctccctccactcctgccacaacccctctcccccagatatccccatcccttccccttcagaagagctcagatctccaggaaacagcaaccaaacgtgacaaaacaagacacaataagacaagacaaaagccctcacattctttgccctgttttccttcttttgagaactttctgttcaagtctccagcccatattttgagtggatcgttccttttcttgattctttttaaattttagttctttatatattctggatactaatcccctgtcagatatgtagctagtaatggtcactctctttctgtgggtttttttcttcacccagttgattgtttctttagttgtgcagaaaatttttagttttatgaagtccctcttgccaattgatgaccttaattcttagacaaatggagtctgattcagaaagtttctttctaaaactatattacttatggtgatatctatgttttcttctggcagtttcaatgtttcaagttttatgtttaggtctttgatccatttggtattttgttgttgttgtttttgcaataagatagatatgtgtctaactatcattttttattattactttttcatatattgcatgcctcatttcatcttctgagtgtggctatccagttttcccaccaccctatgttgaagttgcttctttatttccagtgtgtgtttttggtgtcttcatcaaatattaggtggctgtcttagtcagggtttcaattcctgcacaaccatcatgaccaagaagcaagttggggaggaaagggtttatttggcttacatttccatactgctgttcatcaccaaggaagtcaggactggaactcaagcaggtcaggaagcaggagctgatgcagaggccatggagagatgttccttactgacttgcttcccctggcttgctcagcctgctctcttatagaaccaagactaccagagatggtcccacccacaaagggcccacccccttgatcactaattgagaaaatgccttacagctggatctcatggaggcatttcctcaactgaagctctttctctgtgataactccagcttgtgtcaagttgacacaaaactagccagtacagtggctgagttaaattttgagtcatcagttttgtcccattggtctacatgtctagttttatgtatatgtgtgtcatattgtttttattacagtggccctagaacagtggttctcagcctataggtggcaatctctgggagctgagtgatcctctcacaagggtcactgaagaccattggaaacacagatatttatattaggattcataacaatagcaaaattacagctatgagtagcaatgaaaacacatttatggttgggggataactctaacctgaggaactgtgttaaagggtctcaacattaggaagattgagaactaatgctctatgatatcacttaagttatggaatggcaattcttctagcagcgttgattttcgttcaggatagtttggctatctggggtcttttgttgttccatatgagttttaggatcattttcatgtttgtgtgaaaagtgacaacgggattattattgggattgcattgactctgtaaagagctatggtagaatggtctttttcacaatgttattctaccaatttgtgagcatttaatgtctttccattttctaatgtctttcttatctctctcctcattttagagatactttactttcttagttaggtccttccctagatattttattttctttgaggctattgccaatgggagttctccatgatctccatctctatatgattgtccttggtgtataaactagctaagttgattctgtactctggcacatcactgaatttgtttaacatatctagaagttctcaggaaaactctttgggatctcttacataccaatatcatgtcatcttcaaataggaacagttcatcttcttctttccccatctgaatctctttaatgtcctactctttgcttattgctccagctagtgctttaagcacagttttgaagtggagtagggacacttgacatccctgacttgttcttgacctcaaagggattgtctgtttcaagctttttttatttttgataaggttggctgtgattttttttctatatagcttttattacattctctctagccctacattctaaaatgaaggtgtgactaggtttttgtcaaggtctattgagatcaccatgtgtttgtttttccttaagtgcatttatgttattacatgtgttgacttgcttgtgttgaaccagccctgcattttgaaaataaagctaactaggtcacggtgtataatctttttgatgtatatatgtagtctgtttgtaagaattttattgagtgtttttgagtctacattcatcagagatattggtttatgggtttgtgtgtgtgtgtgtgtctttatttacctgtttgaatatcaaaggggattgagagtactccttctgtttcttttcctctgtttttatttctcttttgctcttccttccttccttccttccttccttccttcctttctttctttcttttctttctttttctttctttctctttctttctctttctttctttctttctttctttctttctttctttctttctttctttctttctttctttctgccttcctgcctttctttctttctttctttctttctttcttcctttcttccttcctttctttctctctttcctttggattagtttaatgattggctgtagatatcctttgaaaatcaggtaattctgctgttaattcatccagtactgaacttttattcttaaacctagaatgctttttattattatctcaatcttatttgttacagtgtatttaggttatcacttctgcttggtttcattttagtggtttcgctgaatcattcatttcttttagatttccttgcttaaaagagtaaaaggttgacagtattctgtaatattctgaatttatttggtgtctcttgtgttgtttccctgttcattttttattctgtcaaattgactctgctttttctttggttgtgtgtgcgtgtgtgcctgcttgcacatgtgtttgggtctattttattgattttttgctcagatttttatcacttcttgacattgactgtgcctagatttggtgtgttcttcttttttcaaacttttgagttgcatcattaaaatctgtacttccccccccccccccgtgggcagtttaaaccccccttagagcaatccatccagtgtgcctcagtggttttattatgtcatgtcttcattttaattttggtccagaattttgctttctttattgatttcttctttaacatattcatcactaagtaacaagttgtttttatctccatgagtttgtatatttataacagatttttttttttgctgatttaaattttattaccttgtgatcagataggatccatggagctgtttcagtctttgtgaatttgtaaagatttgctttgtgtcccaggatgtggtctattttagaaaagcttccaggtactggtgagtagagtccatgttctttgctgtttgggtagagaattctgtagaatctgttaagtctctctgaaatatgatatcatttaatcctatgtatccacctatttcttgtctggatcacccatctgagaaagtgaggtatggagtcacctactattaatagattagttgatgctgctctgaacctttagttccagcagtagatattttgcttaatgaaattgggcacacctgagttccgtgtttataaatttagtaaagttatgtcttcttggttaactgttcccatggttagaatgaagtgtctgtgtttatctcttctgattagtttttgtctgaaatctattttgttagataccaggataacgatgtctacttgcttcctggttccatctgattggagttcttacacctatcctttgactatgaggaagttccaatctttaaagttaagatgtatttcttgggaaaaaaaaaccctacataaatggattgtggtttttaattcattcaaccagcctgtgtcttttggttggaggactgaagccactgatattcaaagtaattactgaaaaatgtgtgttagctccagttgccatgttgttgaattttggtgctagtgtgttctcaatggaattttgtgctttaataattacaaattcatattttccccacagtttcccaatcatgctcataccttcttcatcctgatatattgcttcctttgtttcctttagggttggtttggtggatataaattctgtaaggttgtttatgtcgtggaaactttctccttcaattacagcatatagttttgtgtggtatattagtctaggctgtgtgtcatggtcttttaggatgtgaaatccattgcttgaggctcttttggctttcaaagtatccattgaaaaatctgttatcctgatgtgttttcttttatatatgacttatgttttttctcttgtaactctcgctacacattctttgttatgagtacttagggttttaactacagcaatgccatggggatttctttttctggtctgtctactgacgttctgtgcatttcatgtgtctgtataggtgttctttctttggtttggggaaacttttctactgttgtattgatgaagatctggtctatgccattgacttcggattcttccccctcttctgtgcctgtaattcaaaggtttagtgttctatgtttcctggattttcctttcccatagaggtgggtttttttccccatatttctggctgcttaggtctagatcctctactttaaaggtagagttctggtgttctgtcttgcttaattagctctgcttcttaggttctcctttgagttttctagcagagttattggtcttttccactccatcttcagtgtatctctctgtctgtgtgtgtgtctgtgtgtctatgtgtgtgtgtgtgtgtgtgtgtaggggaagtgtacatgtctgtggaggtgtgattacatgcggagcctagaggacacatttaggtgtcctcctcaagtcctctccaccttatgtgtttgagaccaggtcactcgctgaagctggagtttactggttgggctaggctgactgaccagtgggccctgcaatctgccaatctatgcctcaccaactcttagaccatgcacctcacctagggctttaatattagtctttttaaatatgaggggtctgaacttggatcctctgcttgtataaatgaagcatctctcaagccaccttgaagttctttttctgggtgtaaaagtcatttatcaccaatatctcgacccattcatttagggcagcataaatggtgatatttgaactttattattctctctattttattagctttaatatttctgtaataagaaactttcttgaatcaattccccgattaccaccagttagaaagttttgttaactattttccactttatacactttttaaagctgagagttcacatctataaatagttgcccattatatttttattttttgggtttttgtataatagatctgttgtaattcattgaacttgtcctcactgataataaaattgtccccagtttggttagtaaaagaaatttcacctagtccctgagtctcgtcatcacgggccattcatctctgtgagctgcagctgttaggatggcagatcatttaggttttaatgtactgcaggggctgacttagcttttgtctgcaacataaacgctccctgagtatgaccactctcagtactttctttactcttgaactcacatggcttttaatattgaggtttcccttgcaaagtgtcacagattactcctccccaaacagcagtgttgaactcttctatctgcagtgcttagtacaaggctttgaataaaattgggatgctatcaatttgtttgattatttaacacttcacaacttaagtgggcttatcattgtagaaatgttttcaaaattcagtagaggtacccctacttgtttatcatagcgattaaatctgatttagttgaaaatgctttccattctcaactgtgtagttgagtgtgtttcttcagtcaaggtccagtgactagaattaagccacacaatttataatagcaataagataaactctttaaaacattgtatttagaaaccaattagaaagtgtaaacgtagaagaacagatgaactagtcagaggtagtataggaaaagtattcaccttttcctacatgattgaataattagctattaaagtatcatcttactcttgacataccaagagcacatttttctgtgattaaggacaccatctcattttcctatgtggcttttctagaggacctgagcaagtgtgtgtgcatctggggatgaaacagatcatagaacaaggaaatgattccgtacaaatctagcttggagaaccaatggattttggggggttccttataggaccatgggtaactcaaagacagaaagcttacaccagcgtgggagaagacgcgagaaagcttcccagtgaagggtctttcgatcttcagctgttgttcaaataagcttagggagcagctttgagtccctgtagctttctgggcttcctgagccttataaattttgttagctttttgagtctgaatgaactttcctcctcgttcttgaaggaatgtttcaatccagaggaaagaattacacagatcatagcaaggttttcaatatcatgaacttatagtaatggatgcttctgttttgacaaaaaaatgtatggtcagttcataaatacctttcccaggaggttagctcaaaataatagctaggtaatacccttagctcaagtttacagataaagaaactacagctcaggaaaaaaagtcatattttttttctatcataaaattctttatgctcagcatctagttaattctaagagagtggcaattcattttaaagatgtattagaaaatgaatgttttagaaactttcattcccaaaacagaaaatttaaaaaaaaatctgtaatgcactcatcctagttagacaagaaatgagttagggacagagaggagagcaatggctcctggacccagttgaaattggcccaggatgattatgtagaattccctggatctgtcattctgtccagacaccaggcagcagctgcagaagaccgaattgcttctctcaaatgtgtattgagtttcatttcctttccgcatcagcaaaataaaatgaaatggggaattttggaaatggtctgaaatattattgctgacatcgctgtaatttggcaatggtcggaccattacacagatgatttagcagtttggggaatttactctgcatgtggcaccaggcctgagtcagcctgacactgtcatttcaaattccaccgtttccctcgggattctctgtgatcttcatcaaagagttgtttgtgggagacctactctgtgtgtctgcccttgtgtacatctgagagctgagtcagtccacattagtagctttgtagaatgggcctttaatgtttcatttgatgtcttgtttttgcccatcatctatctcctcccgtagacatccctttggacctggctttcccccaaagcaccactctctcgttctattccactagctaggatttatggctatgctgtctccacctataaaaaccagtcacccctcccccaccccctttctgtttctctgtttttctatttctgttgtcttgctctctcatttttagaggacttgcttcttacaatttgccatttatcacctagaaactgcagttgtaagtgattggaaggggtaggctgtaatgtggagtttgctaatgtcctgcgctatcatgtttcccatggtgcactggttaactgcagcctgtcaccatgaggagttatgggaacaattctgaaaatgcctcttttgtctctattccaaatattcgggtttcaggagcctggaaattctgagacggttttactgagcatgaatgaccatcgcctagatgtatcgttcccaaaggctgattctaagagagtcttgaattttgcagtgctcgtataaatgtccactgggcagttttcctcctgcagaaattagcagagttaactgctagctatgactctggaaacaataataggctctaggttaaactgtttcttaaatggaactgtctactgtttgagtcagcaaattatcacagatctttctagatctatcgctgttgtcacttgttgttgctggctggctggctggctttcaactcaagtttgtaaatcaggctaggctcacagaggtatgcctgcctctgcctttcaagcactaggatgaaaggcctagaccaccactccagtctgttttgaatgccagtgactagagataaatttttgctagacatgcattttttgtgtttcaaataatagaccttacattttgtcttagaaatatttttgaagaaccccactgaacatgtctcttgaaagttttattctttgattatagaataggagacatctcaagaagtaggactgcaggaaggctgttggtgagctgcctcttattgagggcacctgggcaaatgctgccaaggtcgcctcaggaaagcagaagacggaggtgtggaactgtccctctgtcaaagatgacatgctaatggacaaactctcctcaccgttgatactcagagcatcagttcctctcacccctctattctgtcttgccagggtcaaattaatttattggcttcagaacaattccagagaaaggaaaccaaggaaagcggcaagggtagagttagaaaagcacattggcagcacacacaactttataagagctgcccatcagctgcagccaaaaatcaatgaaagccctaggcctgtgggcaacgggaacttacattccgatgagtttgtacttttactgaacaagtaatttgcaatagtggaagttctttgagcatggaagttacttagagtctctgacctataccaggaagtaggggtgaaaataataaccacttgtggtttctgggagaactgaatgccgtgcttgtggagctggagaaatgggtcaatggttaaggacatatgtgtgtttacttttctatcgtgaaagcgccatggccaagataacttacaaagaaagcaattagggctttagcccaattagggcttatatttcagagaattagagtccatgatggcacagcaaagccatggcggcaggaacagctgaaagctcacatccctatcccctcaggtaggagtcagtgagagacacactgggaatcttttgaaatctcccctccccctcagtgatacacctcctccatcaatgtcccacctgctaatcttcccaaaccattccaccaactggggtccaagcatttgattcatgagctgctgggggccattctcattccagctgcaatagagcatatttttgcagagggccaaagtttggttcccagcccctgtgttgagtgattcgcagctacctataattcctgccctgtgaggaccgacatctcaggcctctctgccggcacctgctctcatatgcacagacacattaaaaaaataatccgtcctgcgtaaagcacagatcctggtaggggaaatatgtgctgttacgttcctgatgatatatatagaaatgtacagcactaatgttaatagctcactgttttacatacgtttcagggttaattaatacactgtagaaaggacttggctactcaactacatgatctaaccttaacattagttttatgaaagaacagacagtagggaagtcatcggtgagaattaactcccacgtgtcctcgtaatttgattagaattgactagaattcttttggttagaattgattttgggttcccatgggtctaactttccgggtttatatttttaaagaaaattttagacattctatgtcttctaaaaaaatatttcatcgtttaaaaccgagtcaaatacaaagaaacaacctctgctcctcctgtttgctaacttcctctgatgtcaaagtgagtagagcgcttcttaaattcaagaggaaacttagaatgctacggttttgttcctgctcacttccctccagtggagagaaagaggcagctgttgcttactattttcaactttcttttgtttgagatgtactaaatatgcaacacatgaatgtatgtttttttttcttgtctggatttaaaacccaccacttcatttttctgcaaacaatgatagaatttaaaacagagaagccatcgagatcatctgcttcctgcataggacctgaccagttgattccacttaaaacaagctcgtcatctaacatctatgcacttctttggtgtttttcccctacatacttagcctgactgctagttagtatatacttctctttctaatgaacaatgaaaattctccctgttaattattttaatcaatctaccaccaaataatatttttaaatgtattctcaatttagattatattaatcttattagtctgttaatagtttatcaaacacactacgttttctcttatggatagcttgttccatgcctggggatacactctctgctcagagccctggctgcattcggctacccattcttttcatcctataacacttacaagtattatttgatcaacccagaattaagtgccagactgcacatttcatcccttctttgcattcttttattacaacatagttttggtcactgaaatgtttcatgtcatgagtctattacatagatataccatatatgcaataaatttatcaatggttttcttcattggaagcagtgttaccctctaggggatatttagaaatgtctgtaaatattcttatttgctgttatcgaggagacatggctggcttctggcctacagtgaaaagtggcccgggatgatgctaaacacccagcagtgtaggggacaccccacagtggagagctgaccagagttctgaggttagacgacccaaatgacagatagatatgtatgttggtaaagagtgaatggacctttactgtgtaccatgaagactccgacagttgcacacccttcagtaaaaaccctgaccagcctatctggctttttaaaaaaatatttgtttatacatttagtgtgtggggagatgagtgtgtgtgtacacacacatgcacacacacacatgagcacatgtatatgtgagcatgtgtttgcccatgaagaccaaagcaatcataccccctaagagctggtgttacaggcaaccatgaggtatccagtgtctcagtgctgggcacgaaactcagcattctggaagagcagccagctctctggaccaccaagctgttgctccagcccctgtgtgccttctgggacccacactgtgaacattttaagtaactttgcctctttctttgaagagatccagatgctctgcatcttggcttcataatgattttatgttttgaaacaaataaatttaatatgtttagaatgctggctttaaatcagggtgactgagttgaattagggaccttgagcatatgacctaatatctcttgcctttggtttactcctatgtaaaatgttggtgcttatagtagattattcttattttttttttaattaactcaagatcactttgaagtggtgtgctgcttctctggctttctgttacaacgcaccctcttaccctacaggattaacttcaacagactatcagctctgttcacggcagcatcacagtcaccacctcagcatcagcagcattactaccaccatcttcaccatcaccatcctctccatcaccatcctcaccaccaccatgctcatcatcatgtcaccatcactatcatcctcaccctcaccatcaccatcaccaccctcatcatcattacatcatcacaaaggcttatctctctttgcccttctttcagccagtgccaacttttctaatgtcctgtaagaatgtacaattttaactctattttgaggtgctcaaagctgaaccccagatttcacacaagttactctaggcatatgatgtgcaatagaactgaatcactggccccagagttatttcaaacttgagattatgtttgtgatcaaatacattttaaatattgatgatagtatctgtgaaattctatttgtcttcctatgccaaaaatttcactccacttttataaataactgttatccaccttataggcaaccctttttctaaatagataaatattttcttctctgtcgatgggactgttttttagaatttatttgtatgtatgtgggtcttttgctgaatgtatgccagggtaatatacacatgggcctggtacctttggaagccagaagagaatgtcagatgccctgggactagaattacagacagatttgagtttccatgtgcatacaaggaaatgaagctgagtccttggaagagcagccagggttcttaactgacaactcatctcttcagcctcgttaataggacgcttgtcattagagtctgaagatttttaaggtccctttgcacactccattagccacagcctatggtgctagacacacaactcctaagctttctgtcatgggtagtattctctgtctagaccatcactttccgggtgaatgttctgtcatgacagacaattcgtggagctcagtgaaatgatatcccttgaaatgtgtctaggacaattagaagatgattcttaaaattaggttccttcatggtttttttgttttgttttgttttgttttgctttgctttgctttgttttggatttggagcgtggaggtagagaaggcctgcatactgtttcatacaagggggggatcagaggacagctcaggagatcaattctctccctccactatgtgggatgaagttattgatctcaggtcccacaccatagtggcaagtgcccttacctactgagccatctcattggatagagaatcaatttttaacttttaaaaaagagattaatctcctgagactctggagtaactattcacctgatattttaagcttaaagtcctcactgcatttctagtctctacatgctatgaaaattgaatttgttcgttttattttacctgtgcgttatttatacttcattttattagatgccaataatcttagatcattagaactacacatatgtatttctgtttatagagtatttcactctttaaaatgttctaatttcttaaaattgggtgattaatattttttaagatttatttattttaggtatatgagtaccagaagaaggcatcaattccagtacagatggttgtgagccaccatgtggttgctgggaattgaactagaacctctagaagagcagtgagtgttcttaaccgctgagccatctctccagcccccattaatttaatatttttgcaagagaaataacaatgctcatcaaaaaaattgcaaagatataggtgaaaaaatcaccttagtgatgcaatgcagatatagtacagcctgttcataccttacacatacacaacatacactacatacacaacacattctatatcacatactcacacacactaaacacacacacacatactatatttacacactctctacactcaacacacattctatacacaacacactctatacaaaatactgaagtatgacctgaggagaaacactaatagccacaaaaatgcatcaattatcattttaatcattttactttgtttttttcccccactcttattctcaagacctgttgaaggctgatgtgcagataattagtaaatggataaacagactagcatttttaaaagaaattcaattgttaggtttgcatgatatactaataaatatatccatctttcagacagaaattgagcaaaaaatatgtcactattgttatgtatcatccaccatgatattaatgttcatcttgaacaattgtgacttaataagaacatatgtcctctgccagaagcccattattaacgggtagagcctataatgtatcgctaccatctatgccagggttttgactgacttggtcttgtgatggtaactgtcttagtcagggtttctattcctgcataaacatcatgaccaagaagcagttggggaggaaagggtttatttggcttacacttccatactgctgttcatcaccaaggaagtcaggactggaactcaaacaggtcagaaagcaggagctgatgcagaggctatggaggggtgttctttcctggcttgcttcccctggctttctcagcctgctctcttatagaaccaagactaacagcccagagatggtcccacccacaaggggcctttcccccttgatcaccaattgagaaaatgccttacagttggatctcatggaggcatttccccaactgaagctcctttctctgtgataacttcagctgtgtcaagttgacacaaaactagccagtacaattgcccccttgtcaacttgacacacaaacacatcactagtaagcctcaacccttacgttcttattcatccccaaggtctaaataactttaaacgtcccacagtctttacatattcttaaaatttcaatctctttaaaatatccatctcttttaaaatccaaagtctttttacaattaaaagtctcttaactgtgggctccactaaaatagtttcttccttcaagagggaaaatatcagggcacagtcacaatcaaaagcaaaaatcaatctccaaccttccaatgtcgaggatccaactcacaatcttctgggcttctccaagggcttggatcacatctccagccatgccctttgtagcacatgcatcgtcctctaggctccagatgcctgtactccactgctgctgctcttggtggtcatctcatggtactggcatctccaaaacactgcatgaccccttcaatctgggccgtcaattgcaactgaggctgcaccttcaccaatgccttctatggcctcagctgctctgcgtgaccccttcatgtcttcaaaaccagtatcacctgggtgacccttacacattaccaagtcccactgcagcaggagtacaaccttggctatctctggaacacagcctctttgtgctttcagaaaacacttcccagaagatgtaacctcaacgatgctggtctcttcttctttttttaaatatttctttattaggtattttcctcatttacatttccaatgctatcccaaaagtcccccataccctccccccctcccctccccaccgactcccactttttggccctggcgttcccctgtactggggcatataaagtttgcaagtctaatgggcctctctttccagtgatggccgactagaccatcttttgatacatatgcagctaaagtcaagagctccggggtactggttagttcataatgttgttgcacctatagggttgcagatccctttagctccttgggtactttctctagcttctccattgggggccctgtgatatatccaatagctgactgtgagcatccacttctgtgtttgctaggccccggcatagcctaatcaccgctaatttcttagctccaactaaccagcatcaatagtcccaataatgcaaaggttttgctttagtagtcctggtatcttgttaattacacctgattcttcagccccagctaaccagaaccacagaataatcaaactccaaaatagcaatggccctgaaaagagtctttaattttccctctgaaatttcacaagccaggcctccatcttctgcactgttctcaacataactcctacacaacatctgacagagcttttaacaacgaatggatcttctagcccaaagtccaaagtccttccacagtcctccccaaaacatggtcaggttgtcacaggaataccccactctgctggtaccaatttgtcttagtcagagtttctattcctgcacaaacatcatgaccaagaagcaagttggggaggaaagggtttatttggcttacacttccttactgctgttcatcaccaaggaagtcaagactggaactcaagcaggtctggaagcaggagctgatgcagaggtcatggagggatgttccttactggcttgctcccctggctttctcagcctgctctcttatagaaccaagactaccagcccagagatggtcccacccacaaggggcctttccctcttgatcactaattgagaaaatgccttacagttggatcacatggaggcatttcctcaactgaagctactttctctgtgataacttcagctgtgtcaagttgacacaaaactagccagtacattaactataggtgctatgtgttagtgaatgtggtaactatgtcttgtccagtgtgacaccctacagactcctctgcctccttctctttctgcctccttccccacaaagttccctaagctttggtaaggagagttgaaataaagatgtctcaattggaataagaacctagtctctttttttaaaaagaatacataatggttgagatatatacactgcacttttaaatttgttcttcaggttctactgtttagattccagtaattttatagtataaaataagcataacatgacttttgtagctacaccatagtctatttatctatgtgtaataatttattggatcgggtagctgcaccacagtccatttatcattgtgtgataatttattggattgggtccttattcctgggcatgtggaatgtttctcgtaaatacctctgtgttttctataaggtgccttaagcttttcatctggttatttccttaggatacattcttaaagtaaattcacaaggccaggtggaaggaactgatttaagagccttgatatatattgccaaattgccctccagaaagttctttcttgcttatagaagaaaagaaataatccatcttctaagtctaccctaatcatttttatgtagtattcctttgaacctttgaacttctctggttttagggctcagaattgcttatttttaaatacatgttcccccctcccagaggattagcaaactaatcactgtgtttcatatatagccaaacgatatagctctcttgatttttcttagaaaaggttttgaaatacaacatttttttttattgtttaaattatttctttccagggtgaaccaggagccaaaggagactctggtctggatggcctcaatggacaagatgtaagcctaattctcctttaaataatgttctgtttagatttttaccactgacatattctttctaatgcaattaaagctggctgtccttggcagagccagccacagtcaaacaaatggagggatggaggcagatttttacacagttattttacagccgtgttttcgtttcattactgggctctcaaggcttcatttgtctcatgaatgtcttttcttcctctttatttcttgctgacttttaaaaaaagcctcacttttcactatcaatttcttcctgcatatgttcagtagtgacctgtgttcccagctggcagtcatggttcatgtcacccatgtctccctctagagaaaggctgtgtctgtagaattgcatttatgtagagaggagaagggagaaaaggaaggctatgttctaggctcatacactcttacagaaagcaatgaccttttgaccaccccatataactgtagagtgcttcaagcttaagcatggtacagcctttaacatgtctgcaattcaaatcctgccctttcactagagagctattgctcctccttacagagtgctaccacagatcttaggctgaaatttgaacaataggctaattttccattttattttattttttatttttggaatgtacctattcaaatcaacagtcacttctttctattgaaacacagattgaactgggagcttacagttacaaccctcatcccccatttatattttcatttatatatacactgcttatatggcttaaagggccacattacctagtttacaaatcaagtctatcaaaggaaacactacctacagctctctctgtctagttgcataattcaggaagcctttgaaatccttaacatggctagaagtattctgaaattcatcttgtgtgcagtagaccttcacagcaggaaagaaggctgaaaaccaatctttgtggactgtggaggaagtaaaagagtttgtaagagacttgcttccaaaagagaaatctctcaggagtcacccccagcacaagctttgttgtaccacgcttggctttagctcctgtgtagttcccaagaatatccattcacgttgctactgggacaccaaatgtccattcacattttactgtgataccactccttcttgctcttcaccttcacaatgacttccctagactgtggtggcactagaaccagtggcttcccaccaaggagtctgtacatactctcaccgccttctcttgctacatcaggatgctgaccaatttgtttaaatgcagcatctaacctactttgatatcactgcacaatggtactccattcaatggtaagagtttgggagcaaaggcccatattttaccctacctttgccattcattgaacaaggcactatggaaagtgcacttatggggagacaagaattcctcctgaatgggatggtcctgcaggacgtaagcacaacttcagtaagaaaggtttctattcctttcatcctgtaatttcttgagactaaggaatatgccaccaagcaagaaacagcccactaattttctcagcaagtcacctgccataatgctttgatctagcatgccaaaaaagctagcagaagactgagtttcagatttctaatgaaagtagtttctgaaaaagaatgtgttcaaggccatcttcccagctaatatgactaaagaagaaagcaagctctcattacttgctcctacttcttggtcatggtttctgaatatctcgggggaaaaatcaaggaaggaaaacaccatctacatgtcaactagggaaatagtaaaatcaccctttaattctgaatggctgatggaaaagtctcattttcccactacatcatgcccctcaccactgcatttcagcacttgtgacaattcatgctgaccttgtaattacaggcatacctttcagggaatatattgtatgttaatggtgattttaaatctcactaaagctgagtcactatagggattttagcttccagaacattcagttagaatgcaagcgagcaaattcaatatactaagcttgccaccttctaagctactttctacattacagtgacttgtaatggtttaatatttccactaaatgaattcaaaaaggcctgtcttgatggctttcactgttgcatattggatttagtgtgatgtgatgacccgtataatacatctttctgtgccaactttttcaaaaaatagctagtctacttagcttagaaaaagaaagcacactgtggtccgttcttttcagctgggcactgtgggatttaggacaaggcacttctctgccatgtgagattgtctttatgtatatgtatgcatagaaatatgcatacaatagcatttaacttaaaaagaggccatgaatttgaaagagagcaaggaaaggtgtgtgggagagttgagagggaggaaaaggcaaggagaaatgtaactacattataagctctaaaaaagaaaaaggaaagcagaatatattgtgtcctcaaggttcccaagtaatatgaaatagcctttattcattgggacaacaaggctattctctctctctctctctctctctctctctctctctctctctctctgtgtgtgtgtgtgtgtgtgtctctctctctcactctgtgtgtgtgtgtgcttgtgtgtatgtgtgcttgcgtgaacttgtatgaactttgggttttaactctaaagtattaataagagtatttctactgcagtacaagtgattgctactaagcactatagaaattgcaaaaattttaaatttctataatttatccttcaaaatatcttagaatagacttgatatgtatatatatatatatatatatacatatatatatatatatatatatgtatcctattgtaaccattgaggtcagactgtctggttccaatcccagctcttccagtagctacaggtcacattactctatttttcctccttgttcctttttgtgcatgatgggaaactcagattattagtacttgcagatgtgctgggagaatcaacagagttatcatgcatgcagcagtagaagggtgctcagcacacacaagaattgtatgggcaatcattctctgttatcaaaagcttttagatgtgatgtatcatcttaatagatatctctttcattagtttccttccattcaaatgcacaagagtaggtttcagtcattcagcttagtctttatgtttattttgatctttgaaacatcctacgacaaaattactgtaactggcatttctcgaattaccacccaaatctccatacaccagtgtgatctgtactactaattataaaaactctgaaatgacaaaaccagaaagtaccatctggtgatagctgttgccattgctaagaaactacattatatcagtagatagctcaaggaattaactagtagtttaaatttttaaataaagaatatcttatactgttttatttttttaaaatgctatatatgcacagtgatttttttccaataagacctctgcagtctatttgctttatgtgacagcatccctcagcttttcttttgtctttagagaaaactttccatctcacattacacacagatacaactactatgcttcagggaatagttttactgagatccctaataatagatacccatccatgtgtcaagtttaaaatccctttcatttgatgctttgtgctttttaacttaaagttttatagattaaaaagataaaaactttcgtaggtgaatactgtgtttgcaatattgctcctccccatctctccctctcatttctcccatatcttccccaccactcctcaaattcataacctcttctataatgtttctttacacacacacacacacacacacacacacacacacacacgcacgcacgcacgcacgcacgcacgcacacgctcacatgcatgaccaactgagcccgttttacgatgttcttatgcatatgtgtttagagctgataactgctttaggactggataacccatgactgggcacatcccttgggggagcagattcctttcttacagccattgattgctgatggctcttcatcccgagatgggggtcttgtgaattttttctaatctgcactggcttgtcaacaggcgttgccattatgcaggtcttgtttaggcaaccatattgtcagggtttcatggccgcaactctgctatctagaaggcacagctcaggcattacagaccaacactcatacttctaaacatgttttatgtttttgctctgtgtcttttttcttccctcaggcactcaataacattgatagcagcaacagcatgacaggagaagaaaaatcgtacttgcaaaagtattaccgagctgcttttcagagcctattacaaacccatagccttaacattacggcactttgtcacaggggacatgagttacatggtctacttccatggccatagctgtaggagcttgatgaacacagagcttctctgctgcattttattctctatgacttaaagcacagctgttagatatctgtcaacctgagtgtgaaacaccacaaaacgccattaattaacccttacttgccctaaaaaaaaccaataaataacctttgttaagagacagcaagctactgacagtactaatcattacaacaacgattctgagcatctcttcaaaataactattgcatatacctttttttttttaaatgcaggtaccttgactacctaggacgatgcaacaaacactcttcttttcctgactccctaatgccatattgcaaagtcttgagcacatataatagatttgctggctaataacattgaagtagcttcccacttaattaaaattaaaaaaattattcccatatctatatgctttgacctctgactgaccttgacttaatatcatacatcataagatgctaccttagtgactattctacttgctgtttatatcacctgtacactttcccctgggacttttctaggagtgaaacctcgaatagcacacagtcccctgcttgcagaggtggtttcttaccatcccacctgaggcagctttctccagcatttgtctcatcacatctactgaaatgtctactgtccatctcacaagtcatacagatggcaagaatcttaactttggggaagaaaaatacctgcatttatctatctatctatctatctatctatctatctatctatctatctatctactgactgactgactgactgactgactgacttgacttaacttacttatttgtagcaaggaagactttttactcaaaacggatgtaatgggggaattgcagtaagggaggggggtcaggcgcatctccagatacaaggaggacctggttgtagttgcagacagcagcatagaggagacaatgtgggaggaattactaaagggaaatatcaagtaaggcacagttctggtctagaagaattctttgtaaagacagccaagaactagatgttaaagggaggagatgaagagcagattcagttaatactgagatttgccagagaaaaaccaattacaccatatgggccaaatttaaagtaagccttatttaatattaactactgaccaagggatggagttttgtcacgcccattccctggaatttccccactgaaaatggcctcgagccatgagtaggagtttatatggacaaatctataggccactgtacttttccatgaaactttattattttccaagaactacaactcccagcatttcaggaagttacctagtccttggggaggtggggcttagggattaatttaggggattgccattccgagaatagaagagatttgtaagctgacttagcaatacttttagataaccaagttgagcaagccaagggcaaggcattaggaagagcacccagaggagcctgatttgcatgaggtaatagaggttacttttgttatcaccttcttctcttgtgtctgatctccaaagtgatgcagaaatatagagaaaacgaaaaactcaagacaagagtaaacatgttacagtttctattagtcatgatggagaagggaaaaggattggacaaaattatttctaacatgattttcttaaactacacattataaagcaaacgggaagtacaacacagtagtcaagaacttgacagcatgaccaaggctctgggctcagtccttatcactgagaagaatggggctggagaagaagagcgtccaatgagaagctactctatcagacagagtaggtctagggtagtgagtggccacaaggtactggaaaaatatttagtggacatgtggataaatgaatgatagaaatccattcacagaaatggcatgtctccctgtgagtggttaggatattcttctgccagcttttactctcaagtatctactgtttcagaaaggaagagatagatattccaaataatattccagatacagtgtagtagattactacactttaaatattatttattaaacactaaaatgattaaaatatattaaggtatttattcatttcaaagttgtttttcaagttgaatgttttattcatcctttgttcttgttaatgtctgacatggttttcacattctgtgctacaaaattgtttcatctaattacttttattaccatggtttgtccttcaattctataatgaatacctgtaggtgctggggtgtgcattatttatttcctacaaaactcccaagaagtgatagctagatccctgtgctaggaacagcaagatgtttagacttaccatatgtaacatcactcccaaatgcacccttcccactattcttcctcccccatcccatgtgttcaaaataaaggaaggtatcctccctgctcacatgtaatcaggatgtgtccatccgactcaccttcttttttccacagagaacactttcagctgattgaaagaattgatgtggccatcaccaactaagtacctccaaacacccaagaatcaggaggatttgacatatttgaaaacacatatctgacaacttttctgtctcatgtagttccctttgatatctttataaatccaggttttaaaaaaagaaaattagaaagctgaaacatagtttcaaatggacaagcactacattttgcctccagccccgtgagtgacagaagaatgcagcctctgtagttctcctcccaataattaaatttcttgatagagacatgaacatgttttttgatgtaactcatgattttttttggcaagctctataaaggctaaatcaatgctaaatcagaggtatttacaacatccacaaatttaatccaaagaggatatttcaaggctcatatagatctaaatgatggtcccccagatggtgaattaatgtaattttagcaggatgcaaagttgcacaaatatgcaatattgaggccgagtgctggtttaacgtctctgaagcacagatacgatggagtacacagcacatggaccttaccacagtgatgccattgccggtttctgtactagaaaggaaagattgggatttgggagttcagggaagcatgaactgttttttgtttgtttgtttgtttgtttgttttttgttttttgggttttttttgtctttttttctaatactctatcagtaattgaaacttttggtgactcttccacagaaaactatttttgttatgttcttttcagggtttgaaaggtgactcgggtcctcaaggtccacctggcccaaaaggagacaaggtattgtatctacccaaaagcacacacacgcacacgcacacgcacacacgcacgcacgcacgcacacacacacacacacacacacacacacacacacacgcacacacacacacgcgcgcacgcgcacacacacacgcacacacacgcacgcacgcacacgcacgcatgcactcgcaaacacacactgcctaaagtgagtgacttcttgtagatcctatctggtgacccaaacatcctgaatatggcagaaggctgttgtgtgaaaagcttgtgagtaaggaaagccttttggttgcttcagtgtgagagactgtgtgtgcagttactcgttgacattaacacaggagtgaaacctcctgtttctcacctttgcttgacagcgtgagcgttccatcagcacattagcaaaggtgtcctgtgtcaggaaactcagccagtaacaccaagctgtcacctcttaatgatcagacaggtggcgttggtggaaaggaagctcgctctgtgcctccactttaaatcaaatgaaccatttcttgtgctttccccctgtaccgtttcataacagcattttggaagtggcctttcagtgcgcaccaaccagtattaaattcaagggttgtattgagtgccgtaattaggcaattcagatttcgtgggaattgtatatatctgcattttattcttcatgctgagagcatacagaattccttcctatcttaaatatttatctttgcactagagatgatctcacagagcaatccttagtaactgatttaagttccttaacaactgttacttgtcccaaaaagaaggaatatacaatgctatgccttagaacttaagatactaagtttaatgagaaaaagagaaaatcctagatttagcatgacaacctgatggctcatgccacagacacaaagactccatgacgttcaaggcaacaaaagcacagccagagcactcggtctccatgactacggagttctctttaagtgactagaactcctgagacagaagagcaccagggtgacacaacatgaactttggagactgtttcaaagacggtttttaaaagacatggtcttactgtgtaaccctggctggtctagaacttgcagtgtcagtgaggctggccttaaagtcacaaagatcctcttgcctctaccctgagtgctggcatttacattgtgtactaccgtacccagcattttcaaagactttttaatagtcaagatacacacacctggaaacctgtattcacgtaggtcagcaaagcatttctagtactggaaaatacagacggagggagctttctcagagctagaggcacaagtgatgccgatgcggcagagcctaggagaggatgtgggaacagctccttgcagctggaaggcatggagtggggcggagagatccacttattatttctgctgatcctcattcaaactttgtcagaaaaattatctgccttcatgacgcttcccagctgctcttttggcaaggaaccatatttggaaagataatttttttctaattttagattcatagtcaaaagaataaaaaaaatttagattattttagtttttcaaaacacactttgctattgcagaaagcatgagggcacacaaggcgatttttatatcataagccccaaagggaacatgaaacagctatcattgtgcaaaaatttttaagaaaaattctatttttatgtcctttcaaagtatgaattttctggtagggaaattgagaagggtttgggggaattggaaaacgggggaagaatatgattcaaactatatcacgaagttctcaaaaaacagataaacatgtaaaagaaaaagatttatcattttatattgtttctctccataacctcttaaataatgtacagaaaggtgctgttgttaactgcaacttttctttcatctattttagggtgatatgggacctccagggccaccagccttaactgtaagtaattctaaagaaaaaaaccaaaaatcgaaatgttccatttgctttttatactacatcatgactgagatacaatttaagtattacaggaattgatagtgaactttgaatttgcctagcaaaccttctcactttaaagatgaatttctgccctgagcaatgacatacttgacccaaagccttaggggtgttttttttttttttttaatagaagtctgtaatcagtatctacctcaagcatatttctacatccttaccatggttcataaccatgtccctgtggttgattaggcattattttttgaataaaatatatattatgagaaattgaagtagagagttccacttggcctaaaaattgtaaaagtgacactagatataatcatcccacagggaaaagctcctccccctccttctcctctccctcctcccctgcccttcctcctcctnnnnnnnnnnnnnnnnnnnntcattcccctctgttcctctcccccctcccctccccctcccctgcctcacacccagatctcagaattctctatgttgaccaggttggctttgaactcacagagacccattgaactccgcctcccaagtgctgggattagaagtgtggaccaccacactcagacaagagatacactttcacactggttgttactttgcttgcaaacctaccagagactattttcccatgatttatttataagatttgcaaatgataaaacagcaggagattcgtgataaaagttaataatgtgcacatgataggatagttgtcaggttaatatttcatcatttcttaagtatctaatcataaacatatggagtattcccatttacatacaatctactactacaaattccctacatagagcattaaagattctcatttaacttaagaaagattctaagcttaatgaaaaaggaaaaaaaaataaaatcaagtgtagcctgaggcctgtcattgatattattaatgccgtaaatgaagcatgaagtcactaatattcaaagagccatcgtgatggtagatgtctcccagttctggccatagaacaatgaaacttgaagggctgtgatcttatatgtgtgtattttacctagacttgaacaacccaaatggaatgaaagtattttctacttcaaatcattttccaactggcacttaaagaagaatacggtttcttggtatataggaaatccaagaagtgagacaaggggctttactttagaagaacaaagctcttgaaggattttattttcaaaattgaatgaagtaattttgaaagaaacttttagctttatgttttctttatttacatttcaaatgttatcccctttcctggcttcccctcagaaagccccctatacacccctccccccacctacccactaacacatccactcctgctttctggccctggcattcccctacactagggcattgagccttcacaggaccaagggcctttcctcccattgatgactgacaaggccattctctgctacatatgcagctggagccatgagtcctaccatgtgtacactttggctggtggtttagtccctgggagctctgggggggggtggtactggttagttcatattgtggttcctcctatggggatgcaaaccccttcagctcctcaggtcctttctctagctccttcattggaccctgtgttcagtccaatagtagactgtgagcatccacctttgtatttgtcaggcactggtgaagcctctcaggagacagctataaccgacttctgtcagcaagcacttgttggcatccacaaaagtgtgtgcatttggtgattgtatgtgggatggatccccaggtggggcagtctctggatggttattccatcggtctctgctccacactttgtctctatcactccttccatgggtattttgttccccattctaagaaagatagaagtatcctcactttggtcttccttcttcttgagtttcctgtggtttgtgaattatatcttgggtattccaagcttcagggctaatatccactaatcagtgagtgtgtaccatgtgtgttcttttgtgattgggttacctcactcaggattatgttttctagttccatccatttgcctaagaatttcataaattcattgtttttaatagcttggtagtactccattgtgtaaatgtaccacagggctaaaattcaatatatacaaagaactcaagaagctagactccagagaaccaaataaccctattaaaaatggagtacagaactaaacaaagaattttcaactgaggaatatcaaatggccaagaagcacttaaagaaatgttcaacattcttagtcatcagagaaatgcaaatcaaagcaactctgagattccacctcacaccagtcagaatggctaaaataaaaaactcaggtgacagcagatgctggtgaggatgtggagaaagaggaacactcctctattgctggtgggaatggaagctgtacaaccactctggaaatcactttgacagttcctcagaaaattagacatagtactacctgaagacccagctataccactcctgggcatatgcccagaagattcgtcaacgtgtccaataaggacacaggctcccctatgctcataaaggctagtgactatttcttcagctcaatcacatgtctaactacctcacttagtcacttggtttgctggttgttttcagctcctgtgtgaaagctgatagatgaactttgttcattatttcacttgaaatgaaacctgggacccatagcagccaagaaattgtacgggactctatctgtagtatgaatggttcatagcaactgattcatttcttctaaggagccccccatggtggtctctatgccagtcatccaggatgcattacagagaaaaaactaagatattttgctctgtggtgtctaaagatacgacaaatccagtctaataaaaatatattgcaatttattttataaaatgaaatcataataatatgtgcatattactatttgatataattgccacgaatttgtttccttgtgtacacagtcatcatctaaaaataagggtgtgcactaaatatttaattgatcttataatgcatgttaatattttattaattgaagtaactgatatgagtcttccaggaagccaaaatgactaaccactctgtaatatattaaacaagacaatgataaatcagagtcctaattcacagtaattctcaaaacctactttccactaaaacccattggcatgctttagaaaataccagccttgggcctccaccccaccagattttaatttaataggccgaatgtgggaccgacacattttttaggtcccacaagtagtgtatggaaaaccattgtttacagaaactggagaaacaagctttcttcctgtcccatttttttttttttttaatgagaatgttgcagtggcctggctttcatttgaagtccaactcaatgaactagtaataaagaaatatctctatcattggagaggcatactggtaaaaatcaagatagttttccctccaaaaatccccctcccccactgctccccaacccacccactcccgcttcctggccctgcattcccctatactggagcatagaaccttcacaggaccaagggcctttcctcccactggtgagtgactaggccatctattggatggagcacagggtccccaatgaaggagctagaaaaagtacccaaggacctaaaggggtttgcagccccatgggaggaacaatatgaactaaccagtacctccccccccccccagagctcccagggactaaaccaccaatcaaagaacacacatggtgggactcatggctctagctgcatatgtagcagagaatgtttctttttcttaagaaagcccacatcattgacaacttcaagacagagagtcctaaaggctacccaagcttccacagctgagctgagtaaagagtgagccggctagacacctttcctcatctaaatcatagcatttagttatcttaatggaatttaaaactttgtttaacagtgaatgcaaagaaacagtaatgaatgataatgcctttgcatgaagtttgtttgtgagtggttaagtttatttcagttatttctctatatccctgtgaatcactgttctttgaccattggtttatatttttaaaactaaagaaaaaccacactgtaagtaatccaatactgaatgtcaatccaataggtatcttttctaaatacagcaataggtatcttttctaaatacagcaagccccccgccaaaaaaaaaaaaaaaagtggctcttcctctctcagcagcaatcaaccatcagctaggtctggagtctgtcttcatccaagctaaaaaaaaatttgagataataatataatgacatcatttgccccttccctttcctctctccaaatccttccatatatacatccttgctttctttcaaaaccatgtatttttactaagtattacttttgtttcatatttttaatttccaagttctcatctgtgattgggtctcagtgaaggaagtgaataaaggataagggaagccaatttgcaaggaatagagagaaggaaagttggtgaaatgtcatgaagtacagaaccccggaagcaggctcaccagagaatctcaatcatggtgtctttccttccctgccacctcaaaaccatggactttttcccttatacaggaagccatcgaaaaccaatgtagaaaagagggctagcaagaagattgaccacaatggtgctgcagtttaaatgcagtctgtactaaatgcccttttgactgataaaaataggtcatgttcagaatccatattttgattcttttgataacatttggatctttctgtagattcaccttcacaggtcatatagacagaactccaaagggaccacatgacagggggtgggggaggggataaaaaaataaaactaaatgaacagaaaaggagttggaagaaaatgaagagacagaaagaatgaaagggaaagagagaagaagggggaaatgcaggatggatgggaggtagggagaaagaaaggaatactttggggactgaagatgtagaagtgggtagcagttacacctctgcctcgtctatctttagccataactaaagtcgacttgaattgaaaaatctgaatgatgacttttgacatcgtgtgaatcaagttgcagtcttcccagttgctggctttaaagcttttccagattatcctaataataacacattaaggaataaccttaagaacaaccctgtgaacctgggcatgaaacagtctacaaaacctcgtccaagtatctttccgaaatacaccaagctcaaagaaaagcagcttttcctccctcagcagccatcaaccatcagctaggtctagagtccctcttcctccatgctagaaaaaattgaaattataatgtcatgtcatcatttgcccccttccctcttctccctgcaaaccctcccacatatacatccttgctttctttcaaactaacggtctcttttttattaattattacatatgtgtaacatatatatacatatacatgtatgtaacatacatatatgtatatatactaattatataaatataacctgctcaaggaaagcaataagcatgctaacatggagaggggaaatctcatgaggcctctattctacacaaagaactacagacaactaagggatgatgagagtcagagaaatggtctccaccagaaaagaacacaccaattatttgtccagtatcaaatggtcaaccttgacaatgtgctagaattgcttggtaaacacagccactatggttttatgtatgtaatagccatgctatgtccagaggaccacatttcacagcacccaccaatattttccagttcttagattttttttaattaggtattttcctcaattacatttccaatgctaccccaaaagtcccccataccctcccacccactcccctacccacccattcccactttttggccctggtgttcccctgtactggggcatataaagtttgcatgtccagtgggcctctctttccagtgatggccgactaggccatcttttgatacatatgcagctagagtcaagagctccagggtactggttagttcataatgttgttgcacctatagggttgcagatctctttagctccttggatactttctctagctcctccattgggggccctgtgatatatccaatagctgactgtgatcatccacttctgtgtttgctaggccccggcatagtctcacaagagacagctatatcagggtcctttcagcaaaatcttgctagtgtatgcaatggtgtcatcgtttggaggctgattatgggatggatctctggatatggcagtctctagatggtccatcctttcgtctcagctccaaactttgtctctgtaactccttccatgggtgttttgttcccaattctaagaaggggcaaagtgtccacactttggtcttcgttcttcttcagtttcatgcatttagcaaattgtatcttatatcttgggtatcctaagtttctgggctaatatccacttatcagtgagtacatattatttgagttcttttgtgattgtgttacctcactcaggatgatgccttccaggtccatccatttgcctaggaatttcataaattcattctttttaatagctgagtagtactcaattgtgtgaatgtaccacaatttttgtatccattcctctgttgaggggcatctgggttctttccagcttctggctattttaaataaggctgctatgcagttcttagattcttactgctcttctaagacatttcctgagcctgtgaagagggttattgatacagatgtcccacctacagtcaatctcttaatctcaacattctgaacaacaatgctcctctgtattagccactacctactgcagtaacaaattgctctgatggaggttgaagaatagcaacataatatttagaaggcagtttgataacatgaccactttgaaagtcctcatcaataggcctacgaatctctattcctgggccttgactatgcttaatgaattccttcctgtagagtaggcttccaatccaatcaggggactgattggtcatctccaccaacattttactgttattgcactggtagaaacatctttgctggtaggtcaatattcagtatccagtactgggcaagactgttgctgtcttttctcacccagcagcctgcatagcatcttgaaacaccatgaaatacagccagcaggcagagtttcttgcttagttgaagactaattctgtatcctacaaccaaaatgtgtggtgtcttcaccaatagggtcttactgtctagttgaagtagataaccaaaagcaatgacaatagactccattgcttccagtgtctctgaggcctctctggccaaaaatttatagggaaataactgctactcactgaacaaaggaggttctgtggccaagtatgagagcagtagaactctatggctataaatcaatatttaataagcagtttgacaacacgaccatttagaaaacaataataataggctcttattcatggcctgggatctctccaggaattggctcttgtccaggttaaaataataggcataaattctctcctgtttaatgaagactatggaacataatggacactgcatttattatttaatgtaaacaagtgttaataacttatattattgccttagatgtttttaaacaaagaaaatatcattagatgtctacttttctcttttcattctaaagaaattataaaagaataatgactcctgattactacatgtctatgttatagacatgtacttaagatcatgttagactacaccttttcatacatggtattttcctggaataagtatttgctgtatgctattccttattagcttttgagctctgtccatgtggatgttatagattatatttatacttttcaaccgacttatcttcttctaataggcaaaagctttcccaccaataagtatagaaaaatgtttctgttgctgacattttcctgtactaacaatgtacaatgcatcaatttgtgcctatctttcatgaacatgggtgttttcttggttatatgcatataagtaaatccattgcatgataaagaatgtcttttgtccaatgtaataatatagtgtctaatttccctctccaatgtagcgatatgaattattggcctctttgtcaatttataagaattataaaggcaactacatcttaacaatatttagcatcgttaaatgttttagtttaagcattttcaaagccctaaaacacattcaaatgcttatggggtttggggatataatatggaaaacattacaaatcaacaagagaaagagcagaccactccaaatattatactgagaaaacagctttcccaagagacaaaaaatacactattctctaatggtattcctttttttatgctggcatgcacttacaactttagtaaggtatcaaatttgttcatatggtctcatgtatgtactcacagctacctatgcagccctcatcttatgacaactttcttcttcaagcatgcaagctcatcagtttcacactaaatgtgatctttctgtttcttgttttctgtttgctttgatgttgtagattgttatagttgccaattaatctcttcttaatggaccaggtgcctgctatgagttccttgctcccctccccccgtgttctgggttcctgaaagacacactacacatgtacacacatacacacacacacacacacacacacacacacacacacacacatacagacacacacagccttacatcttaatatgccttgaacagctcaatgactgagtcactcccaagcctccacattgtaaacacctcccctctgatattactgatatttactaaaatctatatttcatttttgctgccctagaccgagtgagaggaggggctgggactgggaccactcttccacagttcttacatgattgctatgttctctcttctgcacctctcaggcctggtctttccctgcatggcagctctatcttcttcctcattccctggtcccttgcccgggaatcctaaagcccagcctatgtctccctgccctgtcattggtcactagcaactttatttaccaatcaaaatcaactgaggacagggaacttcagcatcttacatgcagattatggtgcaatttgggggaccctagtaacataacacaaacattagaccaaatccacattagacattattgttgttgttgtttttaagggtagcttaaataaccttaaactaataagggagtagaaccgtcttttggaatctaagtgtgccgagtttacagtaagcctgtaactcgtatgaatgtttcattctgattttagatttggctaaagaaatttgtttctagttttatttggcaggtttttttttttaaagtctagatgttgaatttgtttttttttctgtagatattagagtagacatgtactgttttttctcttcaacatcttaatattgtaaaatagcttatatatattttctgagtgtgtgcctgagaaagtaagccctacttggccatgctgtatatttttttaccatattaatgaaagatgtgggcttcagtctgaccactcaaagactctcttcactcatctaggctctgttatttctgataagaacttgccaatcaaaatgtctcatttttcataggctgctttcattatttttaatcacgttttaggtctttaataatgatgcagctaggtgtatatatgtttatactttttctttttatcccttctttagaaaggaatcatttctagtgcattgctgtcaggcctagtaatgttttggttatcactggctatagtgttagatactatcaatcaaatagttctcaggtaaatctatcatgactaatgtcaagctggtttcctgatcaggctgtttgtagaatgagatatatttataccttccttgtttgtcaaataattttctcttataattaccagtgaattaaaagacctctgtcataacttgctttctattgctgtgacaaatactataaccaaaggcacgctggggaggaaagtgcttaccattgagagtggaagtcagggcaggaactcaaaggcaggagcctggaggcaggaactgaagcagagggcatgcaggaacacatcttactattttcccagtggcttgctcagcctgctttcttatacagtgaagctcaggcccatctgctaatgggtgatactgcccacaatgtcctggaccctcagacatcaataatcagtcaagaaacttccctacagacacagctaatggagaatctgatggaggcaattcttcagttgagattcctttttctcagatacatctagatttgtgttaatacaaactaggaagcacaaatcctatattatgttatatttctctgaagatcaataatgtagttttaatgagttacattggctgaattcatattacaaaacccttttcattctaattggcacttgttgaaactccactttttaaatttttccccctaaactagaaaagaccagcaagagatttgaacagtatttagattccgaatttgggacaaacttttctccagggctttgtaagccccacccatttactttccaggaatggcctttgacataaaccagtggttctcaacctgtgagtcatgacccatttggggatctaatgacccttttacagggggtgcatatcagatatcctgcatatcagatatttatattataactcataacagtgacaaaattgcagttatgaaataacaacaagaataatcttatgcttggggctcactacaacacggggaactgcattaaacggttactgaattaggaagcttgcaaatcactgtcctaaactctaaatttggatctttcaattcaccttttcccacaagcttttcctttagctacacagttaagtccttgtgctcagcctaaacctcttataaataataaaatggtcctgtgctgtttaatttttccaaactttgactccaatccagtatctgccaaatattgttacatttccatgacttttattacatttccagtgtcttcaggtagttgttagtgcacatactcacacacacacacacacacacacacacacacacacacacacacacagacacacacacacacacacgtgcacatgcaggcacatatgtgcatatatcatactttgtgtttagcaatacaatttacatattatgtaaaactatattatataaaactttgatttttcaagcaggagaaaatgatgaaattttcagactatagaatccatctactaggttaaaaaaatttaaacatgtgttaaaagagggtgagtgtaacagcttcattcagtgacatgtgacctgcctactctccacccttccttgttatgtctttatatttagtccagagttaataattatctgtgttgttgctccaataggaactttggatcattccggaaacttaggatacattttatgtaatattgaattgcatataattgtcttagttgggttgcctttgtgaacatgagcatatagactaatctctctcccattagccttatatttgacaactccctgggatctaaccacttctcatagtgtcttctactaccattcactcacagttagtaccatttgtctcttggttatttctgtcatctctctactacttctgtccaccttgagacttctttctactaggaattgaacccacggctttgcacatattaggaaaaccttcacgactgagcctttatccctgagccttttctgaatatagaaaccaggccattcctgttactattctgctcaaagtcaacaatgtcttctgctttgactttaaactgacatccaaatgcaatacaatagcctgcaaaatcttacagaattaaattcttattgaatttcttaagctgtctgttttttctttctgacaatgtcataactctctctctctctctctctctctctctctctctctctctctctctccctctctctctctctctctctctctctctctctccctttctctctgtctctctctcacacacccacacccacacacacacctccagtcacactcccaccataggagctacacatttcctcttactcttcctaatgcatacatagctaacatccttccctgtggatacttacagggacgtattctcctgagcaagtatatgtaactgcttactcatcaccctctcagtgagcacacaggctcacttctgttataaggcacattagggtatctaatgcccatctgatggtcttacagcacatctcttctaatgttcatagacttctgtttactactttgatttcccttcccttctccatctgaatattaaccatacaaatgcaagattctttgatggctctgctcattgactatgagcacactaggagttagacacagtaagatgctgaatgcaggaattacaccgacccacttaaaaacagagttagtttctttgaatccccagccatctctaacagtgcttgacagattgtttaccctcaaaaaataattggtggtttagtgactaaattctttcttaactttgtaatattatactagcttcagtcattaagcttactggattctctactctaacagagcttatttaccaacaatttgggtgaaactaataaagtggtgtgtttttaaaggtttttccatcactgaccccattttttttaaatctcctgaaggtcatttgtttactgaagctttctgcttcttaagtgactttctcagagagttgtatactgttcagcttcaggtttccagtgaagggaagggtgggtaactgttgaattctaatccctgtgatatgtccactaattattaagtctttgacttacagttgataggaactttacctagagtttgtggtaaatcttaactgtattccttcatccatttcttagcacattcttgatctcttagaaggtagatgtagtacttcatatatcgaaatatcaaacaaactattaattgtgtccttttgcttttattagtccaaatttcaatagcaccacgattccagctgaaattctctttaatacattaccaaccacaaagaatagctccatatcaatgtactatgcatatgggtacaaacatctttaaacaatgagtttaagaactgtgactaaatcagttttcctcaacctctctggtcaccactataacagaaatgatgatatgtctaatatcattgccaaatactaaggtaaaatagatatcatttaggagaaagagttctgaataccctaataaataatagtttattttatgggttacaacgtaacatattgagaagactcttcagaaccagcttgtttctaatatatcatatccagataagtggcaaactatatccttaatgtcaagtcgttttaaagaacaaattactattgtgtttaaagtgtctcttcttgttggtattataatatacaaagaaagtaatgtcatgtctaagtaagaagagcatttattattatatgtattgctatttccttgattgtgatgcgatttatctaagattagagtatgagggaagaaaatgaaccatattcccttttacagaaaaggccgccatagttttgaactaaggatttactgaaataacaacccaacagtggcttcagaagcaagacaggggctacgactgaaatatgagagttggatgacctctccttcccgctcccatccttctggtctgtatgtcatgtcagaagaaagacaggtgtaggaggcacaagactgctattccattcattcatatgtgtgtgtgtgtgtgtgtgtgtgtgtgtgtgtgtgtgtgtgtattctaattttagttcccagcaatatgactgtttgttctggccccatctcactgggaagttattaaatactcatccacatggcaccaaatgtttacacagaggccaaagtttaagtcagtcagcagcaaatggggctttatccatgctcactaaatgatacttaaggaccagctctttggggcccaggtaaaccctgcttacatgaaagtgaggcactgagtgagggagagcatgctgtcactctaagaaatctaccctacatgctgtagtcaatggagggaaagcttcagctggccatctataaataagatggcactcagttaacagacgagcctgatgcccaggagcacatgatgtacacgcactggggcagacttgaaataactctttctcagtatgtacaaagacaattcttcagcaaacatgatatgacatagtatctccccaccttcctctcacctgaatgcttggcatggacagacactgtgaggagcatggggaatactgaagtaaatggcgctagctttgccttcaacaagtgtaagccatcacttagttaaggttggttccttttaaactgatcatttatagctagtatgcaaatagtctatatctaactatagttagttggtacagtatacatacatgtggttatttccaaggaaattgttacttatacattttttaactttgtaatataagaatttatttacattacagttacaaactcatctacttatccatgttttcttattaaaagccccccaaagctataggcagcttgttttaggtaaataaaaatagaaaaaaatgtacacataaacctctagtacatatacatatacatcatatacatcatatacatatacatatatatgcatatgcatatacatcatatacatatacatcatatacatatacacctgcatatacataatatatatatatatatatatatatatatatatatatatatatatatacatgaggagtgagtcaacctaagattcttttgaattcttgttatattgatcttggttattcacatgcttttttgatggatgacataacatttctcttaaaatccaactcaacattggaatttttaaagcacttgttagctgttgggggatatctatagaaatgctttaatatgttttggagcttacttttggtttttaaatcagtgctttttaggggctgtgcaaatggttctgaacatagttaagaacatagccgttcttccagagaacccagattcagttcccagcacccatgtggcagattacaactctttttatctccattcccaggggatctgctaccctctctagtctccacacataggctgtttacacatgtgatgtacagacatataaatacccataaatgtaaaataagagtaaaagacaaactttaatattttaggggtgttgttaatgttgtttgtttgattgattgtttaagacagggtttctctgtatagtccctggctgtcctgaaataagcccaggctggccctgaattcacagagatccacctgcctctgtgtactaagtgtaaaggcaggcaccatcaacacccagaaaacttcataactttgaaaagaaaaagaaaaagaaaaagaaaaagaaaaagaaaaaaggaaaaagaaaaagaaaaagaaaagggggaaggggaagggaaaggaaaagaaaaagaaaaagaaaaaggaaaaggaaaaggaaaaggaaaaggaaaaggaaaaggaaaagagaaagaaagaacaagctggggtgggtgagaaggccacgtggcaatgtctaactgttaatatagtcatcttttgaggaaaagtttaaagaaacaccgtgcatatggtcaagaagagactatcatgaaatatactatttcttttattcatttctccctctcatatgtcacttattaacatgtaggggtcaaaacagattataaatatcatttgtaactataaaattttattatagtctccttcaccattgtctttggaaattttcattttcttagctatagggctaagtttaactcagtattagacatgtgcctaacatgcataaggctcaattctcaataccacaccaaaaatcaatcaaacaatcaacaacaacaaagcagttcaagtaatctttaactagatctaatatctatcctttcataatatattttatttaaaatgtctcttcatcactctatatataaaggaaggaatggcttgactatagactcaacataaagaatcaccagtgtcaaaaactatggaaggtatggcatagtcttctactgagggataattagcctgctagcgaccactatgtgaagcactgaagcagctgagaccctcccaactctgagcaaaccgcatgtccatgattgagaatgcttacttagtttcagtgctgtgaacttggcagcttctcagcccctttcatctcaacgcactacagacccaagtgggtgctccacctgctgtggatttatcaaggttaaccaactccaaaataagggaacccaagtattttataacggactgcaaggaaggtttctctttgtctagagagagggttaatctctgatatcccaaatactaagcaactttcacattgttaggggggaaagtctttttaagaaaagagtctgtccagatgtggtggtgaatgccagcaatcccagcactcgagaagctgcagcaggaggattggagtttgaggtcaaacagtccttagcaccaccggggaaatgctgaacaaggcaaagggacagttacaatccgcctcacaaaacatgcagaaatggaaacggcacgtggaaagacccactctcctctatgccattcctcctttctgcacggtcttggtttctgaccagttttcctgcatgagctatataatcaactgcttgcatgtaagctcaccgaaggaagccgagactaaaactctgtcgcttatctcacatggcatttaataaaaggtactgatgacaggattctaagcaggtagctgatgaacagtcagtgcttctggggaccccaacatccaaccaatagaacaaaccccaaaattgatcgagccccgtcttaaaagccggtgggatattctctgtatgtttctgctctgaactttcttcttgactgaatacattaatccaggaacatcagtggcaggcatgactgtaagagttagagactcattctgtctactttggaggaaagtagtgggggtgctttattaggtatcattttttgctttatttttcattaatttatttattatttcactttacatcctgatcgcagtccccaccccatcttctcctcccaaacacacgttcacaaaccactccccactaccccccagagaaggataagccccctatgcgtaccaagccaccttagcacatgaagtcattaagggcatatctggatcaagaatattcaggtagccaatccaaaatggtttcaatctttatggcctccttttgtccagacctctatttgaaaagcccaggcagatgctggcaaggatgtggagaaaaagggacactcctccattgttggtgggattgcaagctcatacaaccactctggaaatcagtctggcggttcctcagaaaattggacatagtactaccagaggatccaacaatacctctcctgggcatatatccagaagatgtcccaacttgtaataaggacacatgctccactatgttcatagtagccttatttataatagtcagaagctggaaagaacccagatgcccctcaacagaggaatggatacagaaaatgtggtacatttacacaatggaacactactcagctattaaaaatgacgaattcatgaaattcttaggcaaatggatagaactaggaacactctcttggaagcacgggggtggggggagaacaggattgggggcttccagggaggggccaggaaaggggaaaacatttgaaatgtaaataaagaaaatattcaataaataaataaatgcaaaaaaggagaaaagtctaatagaggattaaactgttgtgctcattagattttgtcaactcaaaacaaactagtgacctgggaaggacaaccctcctttgaggaaccgcctccatcagattgatctgtgaggcatgcatttctgggcaatttcttaattgttagttgatatggaagagccaagactactgtgggcagtaccacccctgggcagtaggatttagaagagctgtctgtgtaagaaaagtaactgaacgagcctcaggaagcaagccggtaagcgtggtccttcatggtctctgcttcagctcttgccttcagctcctgcactgacttcctttagtgattgattctaaccagttacaagttactttgttttatcatagaaatgtaaacgcagctaggccagccacttacaaacaggacaaatggaaaagtgtgagctcatggagtgtaacaataaccaggtctttgtattgcatttcttttcaagcaagacctagggaagggctgttctgccctctccccaaccactgctaattgtattgcagaatcattcaacttctaaatagcactgatccttgagtgcttttcctctgatgctttgctgtcctctctctttatgacatggtgttaatttttcattccttttgttgtagactatcatccaattttacagtgcccttccaaatataacactctagaaggcttagcactttcatgaattaagaatgtcatgagttccctcattattaagtctggtaatactgacctgaaccgcccttatcacattcaagtgaagcagatctaaataccttctacatcctaagggtttctttgaaagtagaaattgaatatattagaaataaaatagttttttaaaaatattttattaggtattttcctcatttacatttccaatgctatcccaaaagtcccccataccctgcccccacccccctacccacccattcccactttttggccctggcgttcccctgtactggggcatataaagtttgcaagtccaatgggcctctctttccagtgatggctgactagaccatcttttgatacatatgcagctagagtcaagagctccagggtactggttagttcataatgttgttccacctatagggttgcagatccctttagctccttgggtactttctctagctcctccattgggggccctgtgatccatcgattagctgactgtgagcatccactctgtgtttgctaggccccggcatagtctcacaagagagagctatatctgtgtcctttcagcaaaatcttgctagtgtatgcaatggtgtcagtgtttggaggctgattatgggatggatccctggatatggcaatctctacatggtccatccttttgtctcagctccaaactttgtctctgtaactccttccatgggtgttttgtttccaattctaagaaggggcaaagtgtccacactttggtcttcgttcttcttgagtttaatgtgtttcacaaattgtatcttatatcttggtgctggcgaggatgtggagaaagaggaacactcctccattgttggtgggattgtaagcttgtacaaccactctggaagtcagtctggcggttcctcagaaaattggacatagtactaccagaggatccaacaatacttctcttgggcatatatccagaagatgttccaactagtaagaaagacacatgctctactatgttcatagcagccttatttataatagccagaagctggaaagaacccagatgcccctcaacagaggaatggatacaaaaaatgtggtacatttacacaatggagtactactcagctattaaaaagaatgaatttttgaaattgctaggcaaatggttggacctggagggcatcatcctcaatgtaacccaatcacaaaagaactcaaatgatatgtactcagtgataagtggatattagcccagaaacttagaaatacaatagttttgatattagacatatttggcgtatgagctaatcttcacaacttactcatagggtcatattcaggaagtgtctttatatataagtaaaagaaaataattctatttttgacagtttttaaagttattcaattaaatgtccattctcccttttccagtttattgtttgaatgtgtagagatcatgcaaagccatgtctttttagttctgtgcaaagaagagtctttttgtttatttgtttgtttccttttactgaaaatagatttttttcctctcatatcctgattacggattccctatcttgattcctcccagtctctgcccacctacactcccatctgaatctaccccctttctttctctcactagaaaacaggcttctaagagaatataatataatataattataattataatataaatgtcttagtcagggttcctattcctgcacaaacatgaccaagaagcaagttggggaggaaagggtttactcagcttacatttccacactgctgttcatcaccaaaggaagtcaggactggaactcaagcaggtcaggaagcaggagctgatgcacaggccatggagggatgttacttactggcttgcttcccctggcttgctcagcttgcttgcttatagaacccaggactaccagctcagggatggaaccactcacaatgggttaggccctccatccttgatcacaattgagacaatgacttacagctggatctcatggaggcatttcctcaactgaagctcctttctctatgataactccagcttgtgtgtcaagttcacacacaaaaccagtcagtacaataaactaatacatcagaataggaaaaaacaaacaaggaaaagaacccaagaaagggtacaagaaatagatatagatgaagaaacctattcattcaaacactcaggattctcataaaaacactaaattagaagccataaattatacacaatgacaatcattccttctcctcattccctgagcactttgggaggaattgaatggaaacattctgtttagggctgagtttttcaagctctctcattctatgcatgatgtatggctgagggtctctgtattgttccatctgctgtaggaggaagcctttctaaagacacagagcaaaagactgccccatgagtatagcagaacttcatttggaatcattttgctgctatattttatttgtacatttgtttgttttccaacagtaatatttggttttaccctaggaccctggctatttattctgatgttttcagtgtcaggtataggttccgtctcacaaacctacaaggagtaagtaactaaggccttaggttaagtgagatattggctggttacttccacaagctttgtgtcaccattgtactagcatatcttgcaggcaggtcaccactgtagaacaaaagatttgcagatggtgtttaggatccttcatttgtagtatgcagagttctttcctgtactaaagaggtgaaggctctatgtagaccccaggttgacttgatgttcagtgaagttgtataggcactatctacagcagtggggactttccattcatattttgtagagagcaacatataggcaacagcctgcgttgtttgggattctcatggaacccctttggccaataactatattatacaataacaatattaaacgtaacccaattcaaatacttgctgttacatttgtaacaagaggtgaaaagttggggctctatctacctcatttttttgggtggttttatcaagattgtctttatatgtgtctttctttaaaattctactgttttagattcccataccaccctacaaatgggtcgtaagtctctttccatattccattcatcatcccacttttctctctgccttccttcttgatcctcctgttccagacgcccatccatccaaaactacctattctatttccctttcttaatgagatttatctgccatcactcttactctatacctaccctctgtagtactatgggttatagctttgttatcatttactcaacagcaaatatccacagataagcaaataggtattatatttatctgggttcctccctgaggataggtttttctagttctatccatttgcctgcacatttcatgatttcctttttaacagctgagtaatattacactgtgtaagtataccacagttttttatctactcatctgttaatagacaaagttgttttaatttgtgactattatgaatagaggagcagtgaccatggttgagcaagtgttcttgcagtaagctgaagccatcctatcttcctaaggaactgcaacagtgttatccctataggctgtagacatttgtacttatatcagcaatggctgagtatccctcttaccctacagccttcccttcatgaactgtcatgtgttttgttgatcttggtcatactgattggtgaaagataagattttcattttgagccgggcgtggtggtgcatgcctttaatcccagcacttgggaggcaggcaggcaaatttctgagttcgtggccagcctggtctacagactgagttccaggacagccagggatacacagagaaaccctgcctcaaaaaaaaaaaaaaaagactatataaatgaataaataaataaataaatatattttcattttcccgataactaatgtggttgagcatttaagtgtttctcagtgatttgagtttatctcttttgagaattctgtcaagatttgtaccccatttttaaacgggttagttcttttcttgatgtgtacgttttctgagttctttatatattttggctattataccgttatgagatatgtagttagtaaaacattttcccattcagtatatggccactttagcaaatgatgtcctttgctgagcagaagattttcagtttctgcaagttttcttttgtcaatgagctcaagttggtcaagttcagtgtacttggttttatgttgaggtcttggatccatttgatgttgagtttctgcagcacatatgtagcctgaaatatgaaaaaagcaatccacgctatcaccggcaaggcactggtgggcctcgttctcatctcgtggagactctcagagttccaatatctctccacccagctcgctaagttcccatagtggggtcactgctatgccagccgcacacttctgaatacaatactacccattgtactttttctctggaactcagtcaagttgcctcatgaaggaaaacacaatcattagtgtagaatcaaagggcaacacaatcattgggcacagcaattagcatcctaatagtaagacagtttaagttaaatccactggtagctgaggatttaaatctctgttacccacatttttgctccattgtccttcctgtccaaaaaccctctcctttctcctgcccctgtcatccctgcatatgaccaggaagtccgcctacttgcccagtgattggtttctttattcattagaagggtcacatgaagtcctgagtacatgattcactactcatcccaggcaacccctcttggggaagcagaattagcatcaaaatgcaaacagcaccagggctgtccacaacaggcataagtatagatccatatggatttttctataagctgccatcccagtgtaacaaacaccatttgttgaagatgcaatttttcagtgtgtatttctggcctctttatcaaaaattggatatccatagctgtgtgaatttatgcctgtgctttccattcaattctattgatctgcatatctgtttttctggccataccatcctgtttttattactatacttccgtagtactatttgaggtcagagatgataatatcggctctcttctattactcagaattgtttttagctatcctggtttttttgtgtttctgtatgtagctgaaaactgtcttgccaagctatgtgaagaactgtattataattttgatgtggattgcattgaatctgtagattgcttttggtaagatatccatttttactgtattaatccataagtataggagatctttctaccatctgatatcttcaatttcgttcttcaatgatttgaaatttttatcataaagtctttcacttgcctggttagagttacccccagatactttatatcatttaaggctattgtcaaaggtgttgttccctaatttctttctcagtccatttttttttcagttatatctaagagggcatactgatttttgtgagttaattctgtatccagctactttcctgagtgtttatcagaggtaggatttccctggtggaatttttagggtcacttatttatactgttgtctcatctgcagagaagttatattttcagtttgtatccccttgatctccttcagtagtcttcaagtactgtgttgaataggaatagagagagtggccaacctttcttgtgctaattgctttgagtttctcttcatttaatttgatgttggctatgggcttgctgtaaactgcctttatgatgttgaggtgtgtcccttggatctctaatctctccactccacgactttaatcatgaagaggactagatttttatcatgaagagaagttagattttatcacatgccttctctctttttttaaaaaatgaaatcatgtgagtttgttctcttggattgtttgttcatacagtagatattaaatcatattttccaatttaaactcttgatctatccctgcatctctggaatgatggggggatgatataattgatgtgttcttagattctgattggaagtattgtactgacaatttttacatctctattcatatgggaaaatagtctataaacctctttctttgctaggtcattatgtggtttagttagcagggtaactgtgggcttgtaaaacaaattggacaatgttccttctgtttctattttgaggaatgatttgaggagtgttatcattaactcttctttgaaagtctggtagaattctatgctttaagaccatttggctctgtgcttttattggtttagagaattttaatgacgacttctacttcactgggggttataattttgtttaaattgcttatcttatcttgatttaactttggtaagtagtctatatggagaaaattacccccttttagatttttcaattgatggagtatacgtattaaagcatgtccttatgattctagggattttctcattatctgtttttatatcccccattttctctaattttgttaatttggatattctttctcctctttgtggttaattggataaggggtgtgttagtcttactaatattctcaaagaatcacctctttgtttcatgggctttttnnnnnnnnnnnnnnnnnnnnnnnnnnnnnnnnnnnnnnnnnnnnnnnnnnnnnnnnnnnnnnnnnnnnnnnnnnnnnnnnnnnnnnnnnnnnnnnnnnnnnnnnnnnnnnnnnnnnnnnnnnnnnnnnnnnnnnnnnnnnnnnnnnnnnnnnnnnnnnnnnnnnnnnnnnnnnnnnnnnnnnnnnnnnnnnnnnnnnnnnnnnnnnnnnnnnnnnnnnnnnnnnnnnnnnnnnnnnnnnnnnnnnnnnnnnnnnnnnnnnnnnnnnnnnnnnnnnnnnnnnnnnnnnnnnnnnnnnnnnnnnnnnnnnnnnnnnnnnnnnnnnnnnnnnnnnnnnnnnnnnnnnnnnnnnnnnnnnnnnnnnnnnnnnnnnnnnnnnnnnnnnnnnnnnnnnnnnnnnnnnnnnnnnnnnnnnnnnnnnnnnnnnnnnnnnnnnnnnnnnnnnnnnnnnnnnnnnnnnnnnnnnnnnnnnnnnnnnnnnnnnnnnnnnnnnnnnnnnnnnnnnnnnnnnnnnnnnnnnnnnnnnnnnnnnnnnnnnnnnnnnnnnnnnnnnnnnnnnnnnnnnnnnnnnnnnnnnnnnnnnnnnnnnnnnnnnnnnnnnnnnnnnnnnnnnnnnnnnnnnnnnnnnnnnnnnnnnnnnnnnnnnnnnnnnnnnnnnnnnnnnnnnnnnnnnnnnnnnnnnnnnnnnnnnnnnnnnnnnnnnnnnnnnnnnnnnnnnnnnnnnnnnnnnnnnnnntcggtatgtaaggatcaatatgttatttaagctgtaacagtgtatcttttatgaagttgggtgcttttgtgtttggcaaatagatgttaagacttgttttcttagaattttttctttggtgaccatgtattgtctttctccatctcttttgattggctttggtttgaagtctattatgttatgtattaaaatggctacaccatcttgcttcttaagtcctttggcttggaatattctcaccatttttttttaaccttaagtgatgtctattcttcatattaaggtttttgacatggatacagtaaaaggttgtatctatcctgtttatgcatccatactgttaatcatgttagtctgcatctctttattggggaattgagaccactggtgttgagttacatctgtgagcagtgtttattgattcctgtcattttgctgttgtggtgtattggttcccctcttttgattttcttgtttgggattatttaatctttgtgttttcttgggtgtggttaattgcttcaagttggagatttttttttttttttttttttttttttgtcgcaccttctgtagggctggatttgtagatagatattgcttaaattcgggttttatcacaggatatcttattttctccatctattgtgattaaaagtttctctgggtttagtaatctgggctggtacctgtggtcttttagagtctgtagaaaccatgcccaggcccttcttgctttcagagtccccactgagaagtcatgtgttattctaaaagggcttcccttatgtgtaacttgacctttttcccatggagcttttattctttcttttcccatgcatttagttgtttgattatttattatgtgatgaggaaatattctttcctagtttggtctatttaatattctatatgcttcttgtaccttgataagtatactcttgttgagatcagaaaacttgtcttctatgaatttactgaaaatattttatgtctttggcatgggtttcttcttcttcctttattcctattattcttagatttctgtcttttcatagagtcccagatttcctggctatttcatactagggaggttttagatgaacatttcctttgacatatgtatccactttttctgtcatgtcattagtgtctgaaattatctcttccatctccccagtttgttgatgagcattgaacctgatgcacctgtgagtttatttccagatctccttcagtttgtgttttctttgtttctatttctgctttcagctcttgaactttttaatcagttccttccactgtttgtgtttttatcaattcctttaaagcatttatccatttcctctttaaggatttctgtcatatttatagaggctatatcaggtttttgtcttgagcttcaactatattttaattttcggagtctatagtggtatatttgggaggctctattgtagatatgtattgtcctggatgctattgattgtctttctagactgacatctagatttctagattttagaagattataattccaggtacaaatgtgtgtcttgtcattattggctggctgttttgtttcttagtttctgttgctctctctggcacttagaatgtggtggctatgaatttcctggtagtaaattcttctgggatcctgttaggtgtggctactaggggttactggtaaaatgtgtttctaggcattgggaactgactcttagcattggagatgggttgggtggggccctgaagaggccaataggagagagaaaagcagggaatttcatcagtatctgcttagtccccagggaatgtcatcacagaatgactagagggcacaggtagtctgctacagaactgggaatgagactgggagtttgtatatggaggttagcagagtaagtgaagatttgaagtatgcctacttgctttgctgccctacctattactcttgcaggcttgcctggctgattcctagtgaatgcctactgaagttgggaggtgggataaagcaatgagttggaggcagaaagtttggaggagaagatcactggagatatgggaggagtggggagacagagttgggtggtttgctacagagctgggtataaaactgggaagatttagaggagagggacaagaggtcaggaatggcagctagccttttgcatcctgcctagtgtggctggtaggttcccagggactgcctacttgtgtttcaggctgggatgatggagtaagttggggaaagaaagcttggaggaaaaggtctatatgatttcaggagagtctctacaagctatacttgatttcttcttcctcgatattgtggacttgcttgtgatgctctgtattttcttgacttccgagtgtagtgactctcaagtcctcttgatgtatacactagacacactgtttgtttttcaaaagcatgaaaacaactttttgattacattgcttcatcaagatattatgaaaacatgaactataatttactctcatgccaacttcttagggttttgcaaattgaaaattaggtggcgatgatggccttgtagtgtggttctttggagactgcacctgacccatgcaactgtcctagtaagctgacacatggctccagatatcctggggcctctgtgggacacaccatgatcaatctcatcattgggattagagaggcacagccttcatctctcagcctagaaaacagatgcagttacatagctgggtagcttgacacttgtttttaaaaggcacagttcaaagaaatatctgtccataagtattagcctgttgatctgaaatataatctccaccaataacaatgtcgattcttagttggctcctgaattcatctgtcacagtaacattatcaaggaacaggctttttttctcagtataaaaactgcttttacacatttccttacttagcaccacaaaacgccaaaaccataaacaatatgaccagttttcttataagtacacaaattatcaaaattcaccttatagtgtaaattcacagagttcttggggatcttgcgaatgaagaagtaactcttaggaagccaccttggcatttgtctctgtggcacactttattatatgaattgattcaatctgtaaaacacatttctatggtcctggcaccattaaggacaaattaaacaataaaataagtctttaaagattctatagtcaaaaaggtaaatttaccaccataacaatatgtttgcaataaataagtaaaaatgaattaaaaagttattaccaatgcaaagctatgcttagtatttaaatttattatttatttatttatgtgtatgtagatgcattggcctattgcataagtatgtgtatgcagatagatacataaatgtatgcatgtgtatgaagaccaggtatcaaccttaagtgtcattccttgggatccatccaacttgtgttttgggctgaagtctctcccagggctatgataacttgctgggtgctcccaggatcctactctctatcttcccagtcctgagattctagtattcagaatagggtaattaagaaaattaggatgaacaggataactatttgcttgagagagggtcttgctttgttcatgaactcacaatacttttgtcttccacttctgtgtgccataattataggtgtgtgacaccatgcctagggacatgttccattttaatcaatttaattaagataattctaaaaacaggctataatacctggtctttatgtgggtgctggaggtagaacttctgtcctcatttgcaaacgcaaagcaagtattttatcaactgagctaccaccccagctctacagacaggtattttaaataacttcataggttctgtttcgtaatttgtatagatactttaattcctttgtgttaccctattgtgatgctttgtatattcttggaccaggaagtggcaccatttggaggtgtggccttgtttgaataggtgtgacctggttggagtaggtgtgtcactgtgggtgtgggcttaagactctcaccctagttgcctggaagtcagtcttccactagcagcctttggatgaagacgtagaactctcctcatctctgcctgagccatgactgcctggatgctgatggactgaacctctgaatctgccagccagccccaattaaatgttgtttttataagattttccttggtcatggtgtctgttcacagcagcaaaactctaagacgcctatctttcaaaagtaaatactttaaaaataaatttgcagcagtataagacaaataaaagaatacacattatatttcttcctgtaatgaagagcaagcttcaagtgggagactagtgtttactttcattcttacccaatgttgtcccgagctatcattctcgccagcaagaacacactcggacaaccggattcttctgtggcaagctttattgcttcttaaggagggaagaccccgaccccagaaaatggtgctgcttatatagcccgcagcgtggtgtttcagcacctgatgtggcatgtcagctcctgatttgttgctcacccatcacctcattactatggcccaagatgggcagtgactaggcatgagttcactctcgcacttgcgcacaaggcttgcttactagttaggcacagcggaagctcgcggcacggctctccacatctccccctttttgttttattaaaatgaggctggactaggtctgtgtaattatgtccaaccgctgtggctcctgtcttagatcgttcctctaatgtcacagcctttcccgtcatagggtaaccctatcaccactgggccctgtgtcttaggttaatctgtgcatgaggaaagttgcccatccctggataccacagtgctatgtgacagtaactactaaatgacctagggcgaactctacaaaagaggccagccaaaaaaatcacaaatgccgactaattcttgagcatagatagccaaatttcaggggagaccccttgctctatggcagcaagtgcttgagctatcacgaccttgtcatatatttgttgggctctgagcttgcaaaccaaccagagcatgaacacaagtccacagcagatggcagtaccaaataaacctaccccaacccagtccttaaaataagaaaatgcagatgaaatccaggaggagaggccctctgtcaatgacaggtccactcgcattgagttgatccttaaaactgccaccctcagggcctcaagagtctcatcgaacccctcagaccaattttctgcaagatacaagaagagctgtctagacagaatagctgcacgagtaaaattttcatattggacactggtaatacacagagtgcccaattttctttcacaacccaactgggccaactggtataggacgcctatatgttcctcttttggaatgaatgagtctgaatgatacctctgcacatagggcggaggtgcactaggaccagtgcgcagcgaactgacagttgtctctagctgcttctgtcttattctgtgactgattagctcatccttcatctggctggtatctttctccctcatagcgagccgcttcttcctctaagtctgtttcctcagaggagctaagttccttatccgattctgagctattaacagctagtcccttgaactcgtctaatggtggatagaggctccttcccttatgtgcctccccagctcgatttctcttctctccctttccatccctttttctaagctctcccagggcattttttcccttatttctcttttcctctggctcaaggcccatggaaaggcctttattcttcggtgcaccttgttttgtttcaactcttaatctctctccccgctctgtctctgatagactgtcttgaacctcctccagtatcctctgccccgcctcaaccatttgctgacaatcctcgtctgttaagcacgatcttaccagtttccacaacggcatggtccctgctttaagtttgccgttctgctgttccctaactagatctcctttcagtttctcccaagaggcgatagttaatgaccctgagcatgcataccacggcgctacgcgatctatctctttaacaaaaccctctatagtcttagtggcgatttttaggccacactgcctcaagaccgaccgtaaggcggtcactacggagtgggaagttcccatactgctcactgccctgttgtctaactgtgcctgaccgtgactgagaaccagtcagcagttccagcagtggaagcagtacatgatcaaaagaaaaagaatgagccccgtgaaaacatacaaaaaacactggagaaatttcaagaccgaacataccttacagagccttacgtgtcccgcagttctgaaccggcctgcgaacagggaatctcccttgcgccggtgatggtatgcagttcctgggtttctcagcaccacttgttccgagctatcgttctcaccagcaagaacacactcggacaaccggattcttctgcggcaagctttattgcttcttaaggagggaagaccccgaccccgaaaaatggtgctgcttatatagccctcagcgtggcatttcagcatctgatgtggcgtgtcagctcctgatttgttgctcgcccagcccatcacctcattactacgccccgagatgggcagtgactaggcgtgagttcactctcgcacttgcgcacaaggcttgtttactagttaggcacagcggaagccagcaccatcttataatggtgattgctcgcggcatggctctccacacaatgtgaaaaaaaaaacaggttgtataattttggcatcaagtgggatttacaggtgaattatattattttctaaattggattttctttatctatggcaatcaatgttctcattgatccttactatacaaacgtttgattcatctaaagaattagaatctgaatacccattcatccattcatacctaacagactcaggatgcattgctgcataatgtccacacagatagggaattgaggatatatataccacatccaagtagagagccatactgtgagacagacatcagtgttagagggatgctcgtgagcaatatagatgtctctactttcaaattcaaagccaaggttgttgttaaaatatattatccccagttttatcaaatgtatcaatggcaactaagaatagctatttcagactctataacatgaaaggttgtattttctgaattcagctaaatataagtggaggtcactttggagatgtacctctgaaatcacaggagtggttgtcactcacttgggttgtttctgaagcttctggggcttatttgaattgctacatgtttgagcagtgtacaggactgctctcttttacatggatgatggtaggaaacagttggtcattcagttaggaaacttacagaagctgataatataacccaatatgtactacacatactaacatttcagaagaaatgttccaggagccatagatgaaaaaaattgatctcatgttcttgttactgggaaagctatttataaggattttttaatttatggaagggtctatactactcttcattttagagacgctgacattttagtattcactgaaaactacttataataaaaccacagacttttgatataaacatagaattcattttgagcacatactctaagaaagttttgtgtgtgtcattctaattttttaatataatataaactagcgattcctttaatcattaatatatttttatttcacttttcatagttaatatgtaactatttcttgtgattggactatgtatcatttatgtttttatgtagtcactttttcttgaataaaacctatcaaaaataactaattgttaaatgaaccacctaaacttagaagaaaaaattcattttttcaatgcatgcaatttaggaacatttcttcttgttatcatactaataataagggttattcacattgacagataaactgctctcaatttttttagtatgtattatatttgaaaaataagaccctagtagcattttgaaatgtatgcagatgctgcttaattttatgtttcaggcctatgaagcatattataatgcaacaatcataacacttaaagtatacttcaaaggaacttaaaagtatactttccacataagactttagtcaaagtggttaatagccatcgtatgcactttggcattcctggcaaggggattcagataatacttcaaaaagaaaactcctttgattttagtcagcttctttctttgattgagaagttatgaacatatcttgcctctttttgtaagtgaaaatatgttcaaatgtaattaatctatcctattaactttactaaacatctgctacatttgctaaacatttcaaaatgctgttctgaaccacttaatgctaagtaatttctcagctaaatatttacaccagctttcataatgataagccctactgtgtcttaaacaatcagccaattttcctgagagcagtaagacattgtaatagctactcactggaacttgaaatatgttagctggctaaaactacattttgcatatctttgtttctagccaaaagatgtagcactcttatgatttccatttttgtcaacgtttttaatatccagaactccacggacaatgaatgtctatatagatgcctagatcatgaaaatgcaaaatacagtctcaagagtctttcacaagagtaagtctgtatatctgtaacattatagaaaaaactagctattacaatttataacatattaaataaatagaaaaatagatcaaagggataggtactacttaccaaattatatcataaagaataaatataaagaatataagtgtatcatgttctgaacagttaatacaaaactctaaaaatatacacaacaccatgagaaagtgatgaaatattttactaagttaataatagagatgaaattcagtcatgtgattcattagtaaatgaatcataagacacacttggacatcagcccaatgatcacttcagaatgaggaagaaatgagagttaaatttattgatctattaagaaaatacgactgtaaatccatatacgctgaacactgatatacccaggctgcctgaacaaatgctactggacacagaaggacagacagttccagacacaataatattgaatgattttaacacccaacttctgccaatagctatccaaacaaatctcagcaaaggctcttctgtggtcaaccctagaacagatcaaatgaacctcacaagcactaagggatgttctgtccaacagctgcagaacacattcatcttaacagcccatggaactttatcctaatggactacattttaagaccataaaacaagccttaacaaatataacagtatgtcaaaataatttttatttatcaaatggtaataaagtgaaatgataaatcaataggaagagaaaattttagaaactgtgaaaaatctatggacgttaagtgatgtactattaaatgattatttggggatgtttttaattcataaaataggagaaaaatgggggaaagttacagaatatttgggagtcaaaaaacacagctctaaaatcttatagacatgaatgttttcatttaaaaaatatagagctttcacataaataaattaagactgatttcagaaaagcaagggaaggggaagccacacccatcattcatgacaagaaggaaaaaagaccctgatgtcattcaatgaaaagccttaaaatgctgcaaagaaataatgaagcacggttatttccttgaaagcataggcaaaattaacaaatctttgcctaaattgactaaagaaagaaaaagacccaaattaaaattgagtccaaaaaaaaggtcactggaaccagaaagatggttcagagctataaagtgcttactgctcttgaagaaaacctgagtttttgtccgtgttgaatggttcacaaccaccttcaactctagctccaggatgatctcatccctctggccttcatgggtactgccttctaacctctacacatgtgtcaggccacacacctccttgatatacaatgaataacttttattatttttaaactctgtataatacattcatacaatgcttttgatcaagtcaaactcccattctcttctatccagctttttgccctgtttactgcatctctgaatctctgcggggggggggggggttgctttgttttgttttgttttgttttgtttaaatcacagtgagtccacttaatgttgccagtatgtgatcaggtatagaggtgtttactggagcatagatgctctctgggaggttgcgtttctaaagggaaaagagaagagaaagatgactcttccacacccagcagccacagaatgccaatagctgttcagcccggggtggatttcctccccactagcccctgcatgctggatgctgtacggcttgatcatttgcaggtcttgtgcatgcaatgactgctgctgagtcatctgtgcatgtgtgctgttgtatagcaaaccccacttcactgtagtcacctacctcatctgactcttaaaatcttcttagacttgatgtcccattcaggactgggcattccacactggttattttcttcattgacttgttttgagtctctgtgttaattacaataattataaaagcaagtttctctaatgagagttgagagatatgacaacctatatgcatgatgagaagtctttaggtcttaaagtttaggaattggtttaatactgtgaaccatttgcagagtacctcttatggggcaggttttaattcagctagaaaggtggggagaagggcagagagataaagagagagggagggggattggtttctcccaaaacactcaggccacgtttgcagcagatgcccagcttacctgcctgaccattattgtagttacagttcatttcctggtgtgactgatgactcctcctctcctcaaatcgggtacatcacatttccagcattacaaaagccagccagcggtcataaagctttcatgtcagttgttggaccaacttgatttctccatgttctaagactcaaacataaagagtcttcagcaatcaggtctcaccagcaacttttgtaggataacttaaagtattgcttgcattctctcacatatagaatccagggatgaagagagaattgaaagtaaaagggtgatatttatgagtatgggatgggagatgtaagagaaaaaattagttctgtaatatactactaaaaccaagttatgaaaatgataataattttatgtacagagaatgatgttcccattatcaccaccaagctttgctctctgccaaagctttcttctttctgatttgccctaccacatattttttgagaatcttctgtaagaggggtgggtatagaatatataatacattctatcctgtagaacttgtcatcctgggaaaggttaagcacagtagatatagagtgtcatttacaaagccaagtaagacagaagagcagaatggtttcgaaccaagtgctaagttctcacatttaattcaggaaacccacagcttaggtagatctctaattttcttagtaagtgataaataaattcattgcctgaccatactatgtggaaagaatataagctgagtaactgtaaataataacatatcctcaaataatttctcagtttggaaaaatgtgtgtgtgtatgtgtgtgtgtgtgtgtgtgtgtgtgtgtctgtgtctgtgtgtgtctgtgtgtgtctgtgtctgtgtgtaactgatagatctgttttacaactgccaatattaaaaataattttctttgcaaatgtcagctaatgctcaataatgcagtataaaatgttctggggctgagaaggtcactcagtggcagtgtgaattctgagtttgatagtcagccagtaagtcagaagcaaaatttttgaacatttgggtagcatggctaagattaaatgtaagatgtcatgggcaattttaataagaagttatttgttaaagattaaatagaatttactaagatttttgttaatctgctaccagggtacttcacttagcaaaagtgaagcgggagcaaagcttgtggctctgagacacacctggggtttatgcacatacctaggtaccattatatacccagacaagcctttacacaaaaactctcatttcttaatttgttgatctaattctgaaaaaaaatgtactattttgcattacaaatataattttatttacttgtannnnnnnnnnnnnnnnnnnnaatgtgtgtgtgtatgtgtgtgtgtgtgtgtgtgtgtgtgtgtcctgtgtcctgtgtgtgtctgtgtgtgtctgtgtctgtgtgtaactgatagatctgttttacaactgccaatattaaaaataattttctttgcaaatgtcagctaatgctcaataatgcagtataaaatgttctggggctgagaaggtcactcagtggcagtgtgaattctgagtttgatagtcagccagtaagtcagaagcaaaatttttgaacatttgggtagcatggctaagattaaatgtaagatgtcatgggcaattttaataagaagttatttgttaaagattaaatagaatttactaagatttttgttaatctgctaccagggtacttcacttagcaaaagtgaagcgggagcaaagcttgtggctctgagacacacctggggtttatgcacatacctaggtaccattatatacccagacaagcctttacacaaaaactctcatttcttaatttgttgatctaattctgaaaaaaaatgtactattttgcattacaaatataattttatttacttgtacaggtattagatttttaattttatttccaagaattaagcatactcttttgatgacagtgtgtgcatgtgaatgcatgtgcgagtgtgtgtgtgtgtgttttagaaactcatgtttaaaaacattgacaaatttggcaacatttggatgaataccaaaaatgttgtatattggtttgacattagttttcctaagcacaaagacaatggtttaatctagagctaagactgtgtcagtcttgcataaaatagcatgtctgtttagttacactgtaattaattttgctgtattttaattttaacatttgatttacttacaaacattaggaatttgtcatctttgagttagcctaattctccaacatcccttgcttatatattattttgtaagtgctttataaattacaggcaaaactgatcaatttctcagtccccaagagttattactgcgtaagttcatgaaatacagggtcaccacacctctgtacaattatttttccaaaatcatataaaataatgaacgtgacaaatgtctgtttttattcaatcagttatggtgaagaacacaagtattttttcattaggaacataagcagaaattttgtactaatgttcaaaactctgttaaaattatttatatggaatctttatatcttcagtcaaacatgaatgaaaccttaaatgaaattatgtgaatgaaaatttaatatagattaatcaaactttttgttaaaaaataaatgttcagatggtaaagtcatatatgtatgtatatgttaccactggttggggatttgggctaggtgtttccaaacatgaaccaataggcctcttaatctacagaactgaaataatggctcacacaattggtagagtattaaggggatattgttcaaggaaatagtatagtatagatcttaaagatacgtgctgtcaagcatagcagcaggccacatgagtgaagaaactgactgagttgggattcaagaagaannnnnnnnnnnnnnnnnnnnctgtttttattactatacttccgtagtactatttgaggtcagggatggtaacatcggctctcttctattactcaggattgtttttagctatcctgggttttttgtgtttccgtatgtagctgaaaactgtcttgccaagctatgtgaagaactgtattgtaattttgatgtggattgcattgaatctgtagattgcttttggtaagatatccatttttactgtattaatccataagtataggagatctttccaccatctgatatcgtcttcaatttcgttcttcattgatttgaaatttttatcataaagtctttcacttgcctggttagagttaccccaagatactttatatcatttaaggctattgtgaaaggtgttgttctctgatttctttctcggtccatttttttttcagttatatctaggagggcatactgatttttgtgagctaattctgtatccagctactatcctgagtgtttatcagaggtaggatttccctggtggaatttttagggtcacttatttatactgttgtctcatctgcagagaagttacatttccagtttgtatccccttgatctccttcaatagtcttcaaatactgtgttgaataggaatagagagagtggacaacctttcttgtgctaattgctttgagtttctcttcatttaatttgatgttggctatgggcttgctgtaaactgccttatgatgttgaggtgtgtccccgggatctttaatctctccactccacgactttaatcatgaagaggattagatttttatcatgaagagaagttagattttatcacacgccttctctcttttttaaaaaaaatgaaatcatgtgagtttgttctcttggattgtttgttcataaaatagatattaattcatattttccaatttaaactcttgatctatccctgcatctctggaatgatggggggatgatataattgatgtgttcttagattctgattggaagtattgtactgacaatttttacatctctattcatatgggaaaatggtctataaacctctttctttgctaggacattatgtggtttagttagcagggtaactgtgggcttgtaaaacaaattgggcaatgttccttctgtttctattttgaggaatgatttgaggagtgttatcattaactcttctttgaaagtctggtagaattctatgctttaagaccatttggctctgggcttttattggtttagagaattttaatgacgacttctatttcactgggggttataattttgtttaaattgcttatcttatcttgatttaactttggtaagtagtctatatgggagaaaattnnnnnnnnnnnnnnnnnnnntttctattttgaggaatgatttgaggagtgttatcattaactcttctttgaaagtctggtagaattctatgctttaagaccatttggctctgtgcttttattggtttagagaattttaatgacgacttctacttcactggggggttataattttgtttaaattgcttatcttatcttgatttaactttggtaagtagtctatatggagaaaattacccccttttagatttttcaattgatggagtatacgtattaaagcatgtccttatgattctagggattttctcattatctgtttttatatcccccattttctctaattttgttaatttggatattctttctcctctttgtggttaattggataaggggtgtgttagtcttactaatattctcaaagaatcacctctttgtttcatgggcttttttattggtttgtggattttgtttctattttattgatttcagacccaagtttgtatattttgtttttttatcatctattcctttagggtgtgatttctcgcattcgttctagagcttccaggtgtgctgttaagttacaagtacaaaatggctccaatttctttatatatgcactagtgctatgaatttgccttttagaactgccttcatgtgtcccacaagcttgagtatgttgtatattcattctcactcaattctagagaatcactactttcattagtagtgtcttggcacatttatttcagtcatccgtgagtttgcttcaatttctgtaatcttgtaagcttctgctgtttccctttgtcgatgatgatatccagctttaatccatggtggtctgataggatgcaaaatgttatgccaattttcttacacttgttatgccatacactgggtctgagtatatgttcagttttggagaaagttccatacagtgctgaaaagaagttattattttatgtttgggtgaaatgttcagtggatgtcccttagttccctgtgagttatgatgccagttagatccaacatctctctggtttagttattgttggaatgatctgtctattgatgggagtcaggttctgaagtctccctatatcggtgtgtgaggatcaatatgttatttaagctgtaacagtgtatcttttatgaagttgggtgcttttgtgtttggcaaatagatgttaagacttgtnnnnnnnnnnnnnnnnnnnnatagcattgaaaatgtaaacgaggaaaatacctaattaaaaaaaaagaagaaatgcacacttttttagttttactgtaaaaaaaaaaaaaaaaaagaggctctgagttcaatttaggaacagtgccaaagaatcctaagctgtttttcttctagatagaatgagtttagacttatttatactgcttgtttgcatcaaatacttttatgcatttaatatatatatatatataatttaataagctaataataagaattatagaacctaatgtatttattctttttttttcactatagtggattgattctccagcaacagttggttttcgtagccagtaacattcacagcccctattgagtaagatagatcccacaaacaggcaagtcaggagagagaccaaagctaggttttctcaagattggattgatggttacaaaaccatcaggaagctcggcagccatgcaggaaatgatcatctgagagcctttagaatggagtgaaatggattcaaataaaacaaatctaatcaaggctggtaatccagtgtgaggaatgagtcagagaggggagtgtaaggtgtgagtttgatctctagactgagcaacaagatggtgctatgtaggttgactgtggtggggattgcagaaaaggagtgagggaggattctacactcagtacttgatgagccaaatttgagttgcctgtagatatccaagtggggggtatcgaacaggcagttggctgttcaatctgcatatacataaactaaggctagtttctatctataagtctagatatcatctgtgtaaagggtctgatgcacacaagtggaggagatcaggtacaggatgtaaactatgagcatgagtgtaaagtccccctacagcccatttgaaggttcaaaggggaaggaagaagcaataggaacgatctggaataaccagtaatgactgctgaagagaaaaagatagcaatatagtctgaggttgatacagtctgagtctcaacctgataggttgagaaggaattcttgtaataacaaatacctataacagccaccccagagacatggctttcaaattaatgacacctaggaattcctggacaattttataatctgaattttaagtgaacaaatattttcccctcattacttgatgagactaagggaaatcattcagtactatatgatactaaaaggtacacacataaagacacatagctacagctaatgacaaaatcatgtgctttctaaaaagatacaaatctactgtcaacaaaaccatagttttgtttatagaatctaaatagttaaaaggtaccttttctgcttacaattatggttattatccatgtgtggtactttagcaattacgggctttcagtcataagaggtttgtttattattttgttttggttttaatctttcctctgcctcagaacttcccactacccttttcttgaaccaggtcgaaggacaagcaagacaatgaacagccattttcatcattaacatattgatagactaaccttggaagggctcaagtgacttaaccttgttttgtttagtccctgaaatgagggtcagtcatcacgacattctttcatggcagacacacttgaactagagtgttaacatgtgttcctttccccccacagggctccataggaatccaaggtccccagggtccacctggaaaagaaggccaaagggtgagtagagttgaaacagctggtatagtttgccaacacagaagacaattatttttgagcattaaaaagaacaaaataaatagatagcaaacaggtgggcatagggtaccagctaccaaagacagaaatagaaggttagggattttgacagagtattaacatcagaatagtctacatgttttcgaaaatcagcagcacaaatgtacggaccattatttgtataaagtcagttagccctaatgtagtctagaacatgttggccagagttcccattcttgagttaagttaatgagcactgcagtggaagtcccacctggacacacattctctcaaaactgtagatagtaactaggctcttgacccaaattaactagctgacattagagactctttgaaacttgcatttcactatttgttgattttaaccaagatgaaacaggcaataaatgaatctcagcattaattggaaataccatcatgaccatctctcgccagagctgagtctttgtgtctccagcaaaaggaagccctgaagggttctggcaactggtgtgcttccctgggactcttgacacaccatccttgggtcattctgtcttcagttgactctggagtcttgtgtttttatacactctctcgtatgattgcttatgaagtccctgtgctacataaagcagccagtacatcctcaactctacaacagtgtggatgaggttcctggaacagggtttcaaatggcttgacttggctgctgaaatagagggcaagagttccctcgttgtccaactgtactgtaaatcattctcattttctcatagcaatctcatttataccttctgtgaaggaaatctatgtacttcaaatatatcagtgtacttcaaatatttgaagatcaatttccaaaggcttgcctttgattttttttccttcccttttttgggttcctagtcccactgcagtctagtaatttgtcccaggagacatgaattgacctcttgcaggaatcaagaatgagacaaaaatgtacagttcaatatggcaagtaggccctctaccatggacagtagactcccaatgcagcttaagagtcttattatctaggaaggaggaagctttgggttgtcacagtgtgtgttcagctaaacactaccctcctttgttttaatgaaaacatctacccagtcatgtctttcctggtttggggttgtcttatatcacagtgttggaacaagccatgttatttttcaacatctggaacttagtctctattattttatcatttgggcattattttcttggagttttgttgttgttttaatgtatgtgaatcttgttctccagtcaaacagctcccatctttatactattgaaatcattaataaattctaaacagaaaaggacccgacaaccagataccaatagcctatattttatcatgggctcaaggactgctaatcaaagtatgtgcaaatgtatgtgaactctacctcctcctcacccacatttcttaatttggtttgtaagataattatgagaaacctgtcagccggttgctgaaatgagaaagtattcaaatgggaatgttttcaaaacacacttcaaattgaaattgtaccttatcaaagcttgtatttcagaagacaggtcaaaggataagtgaagttgatgtatttttcataattgcagaggcaattatttgaactacatatctcaatcactattttaatgcaaatataccctacttataaacgtgcgtagtccagaatattttataatactttttattttattttctataaagagtgaccacatcagacagtaatataactaattttagagttattgttccatataatttgtccttgttgctatctctctcaaaaatgccatgcacttcaaagaaaataactatattagatattagtggcattattcatgtttaaaaaataatttctgaacattttcaatgatgtctctaattatgtagctacttaaacaggaagcgaattaatataaggaatgcactcttgtagatttgcgtttatgtccctaagtgtcccatttctcctcctcatgagagccaggtttgaatgctcctcaaaactcattaactgtatggatgggtaaggtgtcttaatgcatgcacacacacatgcatccacaaacacattaacatgcatacaaatacacacatgtatacacaccttcagaaatagaccaataatttttctatctcattgaattttaaaatagaatactatagaaaaatccatgactgtaaaaactatattgatccactgtcaacaaacatgtatattttgattgcaggtgtttgactcctgttaaaattgttaaaacagaatataaaacacgtggcaagtccctaggacttaatttctaggcacaatgtctttagtgaaagatgtttaatggtagataaagctttaccttcttattctccctccatgataacacacagaacaatatctcacaattaggatacgtttataacacagatctcactcacataaaaccatactttatgccagggccaaaaagtgggagtgggtgggtaggggagtgggagggagggtatggggggcttttgggatagctttggaaatgtaattgaggaaaatacgtaataaaaaatatatatataaaaacccatactttaaaaaataccgaacattgcagaagtgtgcaagtattgctgcagttatttttactaacacacaaaattctagttgagaaaacacacacacatacatgataagaagacttctatatattcagtgagaacactgcttttgtgggtacttaaacagaacctttaaatttttaattagtttattttatttgtctcttaaagctgttagatgttagcttacaaattattcatttaataaactataaaattaatgttctcacatttaagactgatcttaactttgagaatattcttactgtatgttttcttgacctgattttcatcttgttttctgccattaaatatttaaccttaactttttgaaatcttgtaagtaaaatatttgactggaacttttaatctttctttggagggaggaaggtgtcaagacaggatttctttttgtagccctgactgtcctagaacttgctctgtagaccaggctggccacaaactcacagagatctgcctgcctctccccccacagtgctggaattaaagacgtttgccaccaccacccagcggtacttttaatcttatacacgttattaagcaatgcgagtgttagaatagctaataataaacaatggtcttatactgtggattcagtgtgtttgagagtggtgagggcaggcaacctatgtggaggcctggagactgttcagctcaggatgagaacagaggagggagcaggaaggtacccaggacacagcagggccagaacaccaaacgagagcactttaacagttatggagaactcagtgggagtaagctcacatcaagggctacaaagatgtgacagttgttgataggggatattattcacttacatagcccctattctaagctcataggagtcccttgctttgttcccaggacttccatggtggctcaccaaagtgcaattccaggtcaggggtttgctctctaggagctcccgtacacacacggtacatagacaagttacatgaaagtgtgcacaagtacacacacacacacacacacacacacacgcacctacacataaacacacatgcacgtgcacgtacacacatgcacacacacacacacacacacacacacacacacgagcaacaaagtcatcagagaaatgtttgttaaaagaagccagcagaagcagtgttaattgagaaagaagttttaattgatcaatgggcgaggcattagaagagaaaatgagagaaaggggggaggctaggaaattagacagccaatggtgaggtggcggaagtggcaacaggaactgaatggaagcccagaaaattatcctaggaagtgacatagtttaggtggtagatcacgtgttcgtagatgctcccacaaaatagttcaggagagttgacttggatagattcctctgagacacagattccctgtggacctccttataatggaatatttcaaagtatacagagaataagtatttaatgcaaccttctacttttcttatacacgtgttgagttcatgcctaaacaatatcagtttaaatgtgaaactcatatgtttttaatcaaaggaatcatgcaggtctctttttttaaaaatgaacatttattagtgagttagctagttacccaactaaaatgcactttgcatggctatacaaagatcttgttcttgttatctgctactagaatctgattttaatattggacagaaatacacttaaattttctacactcttctccatagcccctttagtcataacttcaggttatcctgtgtgtaggggagctggggcctcagactttgtcttacaggtaaattgtacttacatataaatttactaggtttttcatggcaaacactgctttccttctttgcctgtgtctgatctggtttatatgccttaccaatgatagcataaataacacatatgatgttctgataaccactgggtttattgataccactagggcaaaggacactaaaatcactgcttccaggaacccaacagatagtgcaaaactcattcaagcaagtttttcctcaagcccacttggttgaatttacaagactacatatcagactcaatgtaaatgaccaaatctgcacacattcccatattccattttgcacaattccatagcagtcttttggcacttagcatctcccacatctgcatcaagtagagctgctgaagcaatgggttaggacaggaaggcagagagaatgcccatgtctgttaatatcaagtaaatatcagcaaggatacagttgggtctcagcagtaaacatgctctggatttgcttcttgctctgtgcctgatgggaactataaatccaacaaacaagatgcaggcagacaatatctagctcagtctaattgaagaaaggtgaaaggagacagcacaaggcatggactggacttcttgaataaaggccatcctgtagatcaagttaaatgtcacagctacttaatggcagtgtgtctgtgggccattgtggtaaaattcactctaattagtggtgctggacatgaatttaaggcaagaaagacaaaatgttccaagaagggctggcagtgaggaagaaaaatgattgtagcctatggtgacaatccaatacttatgtagacatccaaggcacaatgggccaggtttctcacatccatttaaacaaagggacaagtgacatgatttgtagtacaataagatgactataaattatctccatttggtgattagcaaagaagaaccatttcatagtttgtgaatgggacactgcctatgaatagcatgtttatgcagatctatataaaagctgttctatgtcatggaagaaccataccatggagccttcgaactgaagacatcctgactccaatgtccagagattctgacagcttcagagggattagcctaacagaagggtagcaggtcccagaacattgaataaccaactgtagagcaaacatcaaaattagagggggaaaaatggcagggccattccagcccatcaaatgaaactgaagccatagaaattcaacaatgttctaaatgaggccacagaacaagttatatattttaacataagaaaaaaaatactgtctattctgtggtcctgatagaagcagaagcagaagcagaaaaggagaagaaaagaaggaggaggaggaggaggaggaggaggaggnnnnnnnnnnnnnnnnnnnnnnnnnnnnnnnnnnnnnnnnnnnnnnnnnnnnnnnnnnnnnnnnnnnnnnnnnnnnnnnnnnnnnnnnngaggaggaggaggaggaggaggaagaggaggaggaaaccaacaacaacaataacagcagcagcagcagctgccacctagatttgcatatctttaaaatggagactattgagtttttaagtgaagcactgaccaaagatccactttaaatttcattcttaagaccacacatcgaaaggaacaatggtgccgttgatcccttctggtctccacacagagaaacgtgcacactctctccccatgaccagcctatcttgtcatcagttcataaccagaattgcctggtcagtgtgggaaaggatgggtggctgtcagagtcaacctgttccagctgtggggttactttaactcataactgcaggcaaactgcttcaaattctaatgtaaattagttttatcactacttagctctcaggtatattacagaactaagcctgagacaccagagaatattctttggtgacagatttgtactgaagcatcctataactattacctgcttacccacagatgcacttacgggggaagggaaggggaagaagcgcttgctttgaagtgagctgcgctaaccctccgatgtcactgccttactgcatttaagtcatattgaacacctcttttagctttgccagggtaaatgtcaaccaaaaagttttttgccatttgagaagctgtgaatacgggtgtaaatggctgccaacaccaagcacgaatgtaggaactacaaagagaattttaaaaatgtaaaacatgaagaacgtgggacatgttttatggcgtaatgatttaaaaggcagaaagttgcagttcaaacctcagctttacaaaactattgcatcttgggtaaccttccagaaacaagggaattctgaaagcaagtttaatgcttttgtcatttgcaacatatgataaaattctcaagagacagcagcagttgaaaaataaatgtgataatccaacagttgaaagatgattggacatttctttcccacaggattcacggtgcaccttggtcagttctgaattctacaggaaaagctaatgatctaccttttcttgttttccttgaaaatggttaacttctgaatttttcttattagaaataatggatacccacttgatatttttaataggttaaagcaaacacatccataaatgtttgtactaatgtgactgtgttcactggtagtctttatagtcactacagtgtgaaagagatgctgcatagctttcatttgtgattccagaatccaaactgcatgctaggcagcatctatctcatattgtatgactctgtgtgtgtgtgtgtgtgtgtgtgtgtgtgtgtgtgtgtgtgtgtggtgactatatgtaaatgctgcatatgctcaattaaaatgacactttaagaaaaacagtgcttggagtgtagagatggctcagccattgaaggctagggtctcagccaaaacatcaagacaagtaactgaaaaaagttacaaataaataaaagagcattgaggaaaatgattgcatgcgtctgatcatgtcttcacactttcccttgatatgtttttgtgaagtgttccatagaaaatatttttaaactttaatacatgtatttggccatgttactaggttcttatctttagcacatttgaacatactcttataaaataagttaaattaaagtctgtacactgaggggggaggggacgagctaggtaacaaagaggaagaaaagatggggatgtgacacttgaattgctgtttggtgtggcaagccatggaagttagcttgcctggggttccttaaaagcagagatatgagctgtccttattcaagtcactgactaaagaaacatatgcacaactgaagcacacagagaaagcaagaaatatagaaacgtgatttcaagaagagtctagaatcagtctggttccacatggctctttggggcacaacgaccttatcccactttgaggtaaaaggttgggcttcctctctctgggttgaataagggcaataattccccaggtgttcccccccccaacaggatgttcctcaaaactaaagagacctgagggaaaggttcatttagaagcaaatatctaattaaaaaaaataaagtattgaatgctttgaaattttttgtttttatgatcaaactctcctcgtcagtaaagtcaataagtcgtttcatagccaaaaaaaaaaaaaatagtagccaaattccaccaaccaggcctggctccaaactatgaaaaacagacgtcagtgtcagctaagcagaatcggagggcctctgagcagaagcaggcactatggtaaatttgataatcatagattcacaggaaagcggaagtagaaacctatgcatctttttagatacatagatgaaagaacataattattacataagcaagtgaaacagccagatgctgcaaacattcagaaaagccaatgaacagagagagacacaacccaatagacttaagtaccactgggtatttagggttgaaaatgtctaaaaatcattatatatgtgtgtgaaacagacattgggcaaaaaaaaaatgttttaatgatgactgaactaacaaattgaaactacccatagtgcctttgcctaatgtaggaaacgttaaaaggaaattgtctttttggagatgaatccatttaaagtttaaagttaaaggacccaggcatgacgagcacctccagctcttaaaacctggcttgagcagggctggagggatgactccatggattagagcactggctgcttttccagaaaacccaggtttgattcccagcacccaccgtgtagccatctgtaattccagttcccggatgaaatgttctcctttgccctattcaggcatcaggtatacgtgtgttgcacatacgtacattccagcaaaatactctatatacctataaaataaaataaataaatatccaaaagaaaatattttttaaaattaaaattaaattcatctgatttctcaagaaggaaggacaaatttactatcaggaggtctccagagatagcagaatagtaccagacagactgcaactaaaggacaggcttcagaaaaaaaattactggggacaggcccttgaacttggggtaactcctacatctaggagtagataaagagacccaacttgtctgagttgatgctgccaatctttagaaagtcaggggattactgactgtcactttcagaagctgatatttatcttgtccaatttacatgtttgtgtgtaccagagtgtgtgtgtatgtgtgtgtgtgtgtgtgtgtgtgtgtgtgtgtaccagtatgtgtacatgtgtacactggagggtggatgaaggatggaggttgatatcaggcgccatccttatttattgaggcagggtttctcatcagatcaaagcttgcacataaggccgatcatgctagccaactgattctaaagatgctatctctgccttcagagactagagttctgatccaccaagacttgcatgcatttgaggattaaaattctagttcctgtgcttgcaaagccagtgcattaactagtatatcatcttccttgccataagctggaatttaaagagaaatggctcaaggcaacgtcggggagacaaggacaaagtgttctcttgtattcaaatgacattcacaaacaaaggaagaaaccactgaacagggagaaattaaagatataagcctcctgaaacagcagtataaattgggtaggtgtccagagaaagttgggaaagcataagtgcagtcaggaggacccacaagaaggcatagagcagcggatctcaaccttcctaacaccgtgaccctacaatacagttcctcatgttgtggtaacccccaaccataaacttatttttgttgctacctcattactataattttgctgctgttatgaatcataatgtaaatatacctgacatgcaggatatctgacatataacccctgtgaaaggaatgtttgaccccaaaagggatcacagcccagaagttggggtccattggtatttagggatgtgagcattcattttgggaacaagaaggaaccaaagaaaatttcatcctcatgatacatatgtatgtttgtctcacatagaaaaagaaataagaggagatgggacctacaaaagtctctgctatttatgaggcatttttatcatgactgttaaaatagatataccctatttcattcataaccaagcccaggtcagtgaagaaaagtcagagaaatatacaaatgttgagaaggccaaggtaagagaccagagaaaggctggtcactgagggagaaaaagatctgtgacatcaattcagagtattgctaggttctccaagtttctagtgacgtccaggcactccatcgtaaacaccccatggatgatggtgctttcctacataaatttccagtgatacctactgtaaaaatcccttttatcagctatcttaaaacaaaacattagttttgttttattagttattgatccaactcagaccagttggatctccttatctacttctagaggtagaagacagtctaaatcttttagaaatttttattagtaaaatataaattaggtaagggtaaaactgtcagaactaaattattcttatatttattgcttctggaaaatttcacatcttatatccctgtaaacattctttgaaccctcattttcctgaattctatgtaatctctgaagcatgcagatgctgttaaccatgctaggaaaactcaggagacccatttataccacaataagtctttctcacgcattaaaacaatgcattattgaagttatggccacaaatttgtgtgtgctatgtgctcatgtattataagctggcgtgcttttccatgagagctgactagatggatgttgtatactcctttgcagttgttggccatagagctaaaaaaaaattttcagagtaaaataaggatgaaataaaatttcctaatcttctcatgtaagatttaaatggtgtactgcttgttttctttcttattttgttaaaattgtgtgaccagggtgtgcctaatttacttttattatacaattaatcatctaatgaaaacagaagtaatctatgccatttgtagaaacttttatttttaatcttttattcttaagacaacattcctaattattcccccccacacacacctctatactcttttatattttgctactcaagttcaaatataattataatgagtcttctttaaaactatttttctgctatatcactttcaaaagttatgtagatttttagcaagggcacaatttttaaaaaaatgaacaaatctatgaaactttctcagatcttgttattcatgatcagatttagagagtgtggtagactcctgtaagacctcaaaccataacagacaggaaatatatgacttggagccatttctttcagtatcttcagtatgattctattaggaaacattctataccatcaccttctaagctacatcaccattaagactaatatttgtttaaacagggaagaaacacctaatggtaaaacaatggtcatggaagttgtgcctacagaatgggagcaataggatcatgcatcagtcagctttctcatttctgtatcagaatacctgacacaaactatttaaggggaggaagggtttattttgactgtggattcagagagttcaattctcttaggttctattgattcttggtccatggggagggatgtgtgacactattcctgggaaggcatgtttcatgggaagacactgttcatgggaatacataaatttgtgctcacctcatgatagtgaaatgaggacagaccaaaatacaaatagcaccaaagtccaacttggggaaccaatgagttttactggggttacttacaggaatatagttgggttacttagagaggtgactcaaggccagctgtatcaccaatgccaactcatacatacactcataaaacctggaacctggagctcactacacaacttacaggcagctcaataagatgaagactgtcctttccaggaggctcagttggtcccagcattttttcaggcagctctgcatccctgagtggccagcctttctctgctctttttctttggccttcccaacatctatctatttctctgtcttttcttcactgacttgggcttgtccatggacaaaatagacattaagctatcttaacaatcatgataaaaatgcctcttataaatagcaaaaccttttgtaggtctcgtctcttctcattattcttttccgaatgagacaaacatacatatataatataaagaagaaatttgctttgattccctcttgtccccagaagttgtacaccaagatgaatggttttaatcttgggaaaacagctacaagacagggtggcagaacatcctagcagtaggaacatgtggaagagtcacctgtcctatcacagatgggaagtagagaagaagaggagaaaagtcttactagatatgaccttcataagtacagcctctgggttttgtgtcctctaccttcctaaattagcaccaccaggaaacaagcaatgaattcatccttggaggacacttagatgcaaccgtagcagacaacataggaggaaggaggacaagaacagaccttagatatctgcacttccttaaagttagccctatgtttgctttcttcaaagcctggactgatgtctgcctagtccaaaggaactaggagaattaagaggaggctcctttctctctcaagtgacaggagctgggaaaccatccttgtagtgtaagtggagttgttgaagcgtggtgcttaggaacccataagcaagctgtggggtgtacagaagttgaatatgcttgtttggaacctttagtaacaatggactataactgtatagtttcagcctgtgatcactggactctcctggcaacaatccttcaaggagtagcattgagctcatggggagttacagcttctgttggcttcctctgcatcataaaacagcaggtccacaaacttgtggcttttattaaagtaaaggatcaagaccgcatgccctgagaaaaatgtgatcatttgtttctgtggacttttatggtttatatcttagtttatttacatatttaaattattagtctatctttcattatatatcttgtactcatgttaaagatggaaagtgtattttaatcctaattttcaacaaaacaattttcactaaatttctttacatctcattagtagaaatcagctaaatgagaaccttgcaaaaaaaaaaaagtctaaagaaatctagaccaaattaagtctggttttcctaggcagtatgattaaacatatactgaatctgttaattgatggagaagcattatttcacagcatgctatctgcagttgtgcactgggtaatgaggcagtagattcataaaaaaaaaaagttagcaacatgtatgcataaaacttagatataaatacaaagcccaaaatatttctaggaaaacaaatactgattttaaaatgccaattaaagcaaatgtacactatttcaaacacaaacattagtattttcttcataattttttaatattgctgcaactacaaaagaaacatacagtatgctgaagcaattgtaagcaaaggcatcaaagatgtttgtttggaattgtgacatgattatgtagaaaaactgttgtttgacatagacaaaaaccaatgagtatcaatgtgggaaacaaacaaaactcatgaatcgtgttcagtgcattttgactaatatacaagtagcatccatggagcacttcagaatgaccgcaggggatggtggtggtaaagagctttcctctttagtgaaatgcagacaactatgagagactacactgccagaaaatacaattaggagctttactcttgcacaggactttgttctggaagtacagctgtggggatgtgtaaacttctcgagttgtccccaagttcggttcccagaaaccatattgggtgattatgacatgtaactccatctttaggtgacccaacatgctccttagcctacacacacatacatatgtgtagacacacacacaaataataaaagatttttaaaacctactaggtttttaaaattattattacatttttaaaaattaaatgtaaacatctagaaatataaacatgccttgtttcctattttctattttaatatcaatatttccatgtaaaaataatgcaatgtggctatcagtggcagaaaaccaattatcaaatagtgtgttaatcatggtgttttatatcagtcaaacattattaccaaatatacttaaaatgtgatcagttgccttaaattttacatttctcaacaaggaagttttgtatgtaaacattacagatagccaaattcatttacatgtgggggataaaatttaatgaagtacactatcataatagggtagattcctagaactagctactaatgaaaacctgaagatgaattttgaaaaatgcaatatcacttttcccattttataaaagtgtaacttatgaagatgactctgagcttgtgaagactagtttgaaatttctttttccatcccctttgaccaatgctactcatctcacgtatccatgaatacaatcacatactcgtgatgccaaaacatagcaatgaagctcttgggataatgagtacagcctataagaagcactgtcatttcaacttggtctggaaataatagaaagcacaaagcaagctcatttttaaatgcaaaacaattttgttcagttaaaactgtttttgtttgttcaaagtgtataatagacattttatattggaaataagtgtttcactcataatttataatcaacgtgcaggcatatattcattacacatattgttgggctttatatagacattttcagtcaagactttcattcaagacattttcgatcatgttctttgaccacattccccttctgatatcaccccttccccatctcttctcttgctattccattcattccccccagaggtcccttcttcttcttctatgatgtgtgtgcatgcacgttcccgtgtgtgtaattttatgaatttatataagatccacaaatttacaatgtatttgcctttctaattcttctgtgtctcttaatatgacaatctctgcttctgtccatttgtctacagattatttaattttattctgctttatagctacacaaaacttcgctgtgtagatgtacaaccttccctgtatccactcatctgtttaaagacatctaggctgattctacaattgctactgtaaatagtgctgcatgggtcaattttggaagttatgttcccagaagtgagtcatatgataggctttttcgcttttaggggactgtccaaactgattcccatagaagcagcaccaattcacattcttaccagccatagggttccctgtctatggatccagcatttgctggatctgttttctttatgataaccattctgaatgagaagaaataatatgtcaatgtaggttttgtagattgctgttggtatgcagctgaggtcaagtgcctctataaagctagagcctatgattgggcaatgtaaaaggaaggtggggctaagagttttagggagagagagaggacaggggacagatgggagaaaggcagagaaagatggagaaaaggatgaacagcatctacatggcttgaaatggccacaggtagctatggatatcatagaagagcatagaatattatacggcaatttgttcaatctaggtgggcagcttgtatcaatatcaattgagttttgagttctttgtgtaggcatttgggggattgagaatttactgttataaatctgactgataaattacaggcctctagagttttctttatatggtgctcgaggttgagagcaactcttggccgactgaccatagaggatggatgactaggaatgtaaggaattcagaggcaaggaaacagggaaaattgggtatagccatggggtggggagaccgctattgttggtgagtagctggagatagattgatttttaataattacacacaaggtttaatttgcatttcctaatggctaagaatgttgatcattttcttcctgtttcttgtctatgaacacatcatcgtttgacaaccagtcattttattagcttgcttactaattgagttgcctggatttttttcataattagttttctagttctttatatgttctaaatttagtcctctgtcagacatgaagttaacaaggatttcctcccattcagaaagctgtcttttccctcggttaattatctcctccactaggcagtagtgctttattttgtttgtttgtttgttttaaatgtcatccaaatccatttttcaattcctacttttatttcctaagctatcggagtccattccagaaaggtattgatcttgctcatatctttaagtattttccatattctgtcatctaacaatttcagagtttttggtcatgcagaaagaattctgactttcagaaaggtgagaagaggggggtcttagctttatttttctacatgtggctatgctgaatttctagcaccatttgtgataagattctgtttttttttctccaatatatatccttagtgtctttatcaaaaattaggtgggtatatacatttagacattttgtgtataaatactacaatctatacaatttagttttatactaactaagataaatgtgtacatagccaggtcccctctcagaatgaaccaatagaatgtgcagtatactcttagctgtgttgtatgttaataggatttagaatgccaatagccatatgttcaaagtaaggctagtctgttctattatccattctcctttattctgggtgactcagaataattcccttcgagtatccagctatgcaggaccaagcaaccactgggtctaaaagtggtgttcagatggaatctctcaaaagatcttttaagaggaaataggcattcactccttcattgtttggggtgttttcctctaaaagatagaacataaatgaccagaacaggtaaagtgtgaatagtctgacttctttctataagatctgaggatttgtattacacaaagagcttaaagagatgactcactgtgtgacttcccagaactgaaataccttaaagctcagaaaaagtctgaatgtgttgggtgtaatgcaaatagccaagaacttacagtctccaagacatcccgggaaggatttgtggggggaattaactcaaaggcagagtttagatttatgataactggttatttttaaggtagggcagacatatctgagtttagaataggtaaatctgtctaaatcataaaactgaaatttttcagaccacttgatcgatgctgataacacatgcaacatgagcaatacaaatagcattcacaacatgtgactttgcatttccctatatcagaaactcttctgtgatgagagttaatatttccattttccacacaaaaatgctgaaacataaagaagttacggatactatgtttgggatcacagagcaagacaaaagtcagcttataaccagttcctcctgaccaattctgttcatacaacagctaggttttccaagatgttttaatacataannnnnnnnnnnnnnnnnnnnnnnnnnnnnnnnnnnnnnnnnntagcccactttggagagaaccctgattcattcttctactgatcctttagaatcactttcctgctttcctctccccctccctcccttctcttcccctctccctccctcctcctcccttctccctcaccttctctccctccaggcatacattcttcctttcttcctttcttaattttgatattttagaacaaacatagggtctcatgcatactaagtatatgtacattgttccattgaaacacaggcgcatacacacacacacacacacacacacacacacacacatacacatacacacacacatacatctttgacactttttctcttcccttacctagagtttaggtgctgcagagtggtttgtgggggaaggaatgttctgtactatatgccaagggctttcttggagcccctccccagcttcaaaccttgccaatagaaaccattcatttcataacttagtgctttctatggcaatttagttatttcaatttttactaataaaacattaacttatgtacaatttccacaatgtaaatctcaaagggcatggattttcaaggcatatagacctagcgtaagtgcagcttccaggcacaggtaacatctcctatcctcatattgtgtcagggtctcagttttacaataattacaaaacatactaattaatattaaaatattaaacctggaactatgactgggaatatatatatatatgtatatatatatgatagcttatatattatagatagcatatatatgtatgcatatacatacatgtatatatgtaaacataacatacatgtatatgtatgtatatatatacacacacacatacatagagagagagagactgatattggtgcttataagtgctagctactatatcagaattactacatttaccactaactagagcacagtgaaatcctatagcatgaattccagggaagttcagtggctcacatagactctcagagccatttctggatctgtggctagcacacttgcccaggctactctatgagtaagtgtcactaaccaccaaatcgttgggaggtttgaatctagccaacagtggtcctcagggtagggctaaagctaaatgaagaatgagagttttccccctaagtcccagtagctctatcctggcccctgactcattaaagccagttcgtgcactgccctgtggaaacttacaggtgctgttgggtgggttttccacttactggggtgctaaataaatactgaccatcatcagttcccccagaaaactaacttatatttagagctgttactactagttttgactcttcttttggtcatcagacagacacttgtaagaggagcagcacaccaggactaggttatttataacacgggatgacatggaattttcaggaatgttttatggactacaaatgcttcatccagacttctcattcttcttcccatgccttgatgttataaaatatgtcaggaggaattcttaaggtcaccatatctcaaacctcttagaactatacactgtttcaaacctctaagacacagacttgattatcagaaggcttagatttaatttcagctcactgtttgtacttagatataatttgtaaatgtttgctcttatttttgctgttagagagaagtgccacaagatagttggtttttgttttaaaaagcagttggataaattaaaatatttgaaatggggcatcctgtcagaaaacttaatgtaaaattgacattacaagataaggtttttcttacagaggataatgatatgttgcttaattctcctatctcttagcttgttagttcttatattggataaaacgtttgatcttcttagtgtatcccagtacagatgacttcaaaagctactttaaactttcacttagaagtaagggcacagtaacttctgtaccctttacttaaggataattcctttcagaaatgttgcctactatcaatggagttgagcactggcagtactttaaaatattgaaacacaaggataaatattaaaacataatgcatagtatgtatgatatttacataacccagaagagtaccaaggaccagaagaataccataaaatgtgtgagactcattacccataggcagaggaaataactcttcatttggaaaggatttccaaacaggcttcctggacatattgcaatcccagctgggacaataaagatctgatattcaggttatctgataatgagtttgaggataccacaggcttcatagtaaaactttactgcaaacaaacaaacaacaacaacatttaaactgtggaggggggctgtttatttttaaagaaatttaagaaactattctgaaattatcactatttatttattctatgcctgtggaaatcgtatcattgttatgttactcattttgaataagctatggtttttaatttgtcttgggaagataatttcaagaaaatttacaaaggtttatatttactataacattaacaaaaatagcaacataaacatcgctatatcctaaagatgtttcaagatataattaatcttccagctttgatgttgatgcttgtctataaagtataataatgagtgcaatcacagctttcctcattagtagaagctcatcatttcagaaagctatattcacttctattttccttattagctcagaccaaaagcaaaaacaaatatttaatgagcaccaattacattcccatacattgcagctagagcaacaaacacaacaagggtgcttaactctttgctgctgactttcataaataaagttttattggaacacgtcaatgcccttttttgttcatgtagcctctttggttgcctaacagtagagatgaataagtatgtgaaagtgtatgactctcaaggcactggttctcagtcgtcctaatgctgtcaacgtttaatgctgtcatgttgttgtgaccccaactataaaatgattccactgctactttataactataatttggctactgttgcgaatgtaaagatctggtattcaggatatctgatatgtgacccccaaaggggttttggctcacaagttgagaaccactactctaaggctaaaatactcactttcttttcatccacaataaacgctcccaaactctgtgatatacaaaagcttttgtctttcgtggcacccattctaacacagatattcacaaaataagttttgtgtgtataacagtaagaaacaaagtataagaaaacagccggagagacagttggtattgggaaggaggcatcagagaaagtgtcccagcagagatgactgctggccaaagatctcacagaagcaaaggaacagactccgggggtatctggggaaatctcttcagcagaaggagcagatgtaagctttgaagctcctgttgaagtgatgacgttctttattaaaatataaaatataaccacaaccaataccacatatcgatagtatgtcagtgtggggccattgctactttagccattcgtgttgctgtaaataatgatggacaacttggctttttgtttgtttgtttgtttccttaacttacttacacagggaaaaggcatacagcactaagaaaaatacacactgagattataaatgtgtcaatgactggatctatgtataactttctatttaatctccagtaactgacatatattcttcatgtagtaaatgcacaaatactgatcacttgtgcaatattttctttcttatttccctactcctttgtgttccttattaccagactgtttctcactgaagtagtaaacaaatctgtaattttgattgttgctcacattagcttttatggttttcattactcatgatctcaaaagtgtgaagcttctacttcaagagctcaaatttctacatgaacatgagaacatgaccatgtaatactggaggctttcacagactacacactgaattttccattttgtgtttgagattttgacaccaaatagatttcacttgcctgtattttgaatgcatttaagtcagattaatttttttctcaatactaataaccaatcatttctactgatgagtggtagttcatgttctaccacgatttgtttaacctgactctctgtagaacacctatgtcatttccaccttggggctgctatgcacaaatctgccttgaatatgattttttaatgttgaacacgatttatctactatttgagaagtgcaagcgtattgatcaggtagataccacccacgacttatctactggcttcttgcacaggatgtacacaaggtcatgttagccaatattcagcatagataggggaggagacagggtggcactctagctggagcactattggcagtgggtgacctctggggaaaggcaagtcagctttcttcgggaatgtggcctctggtaggttcccatgttccagtgaatgtccctatcccatgtacatatggacagctctcactggactcagtggatcataaagaacatgaaatagaagaggatgaatcaggctccattaaagtgactttgcagattggtggtatactactatgtcagggaaagagagcagcatagctttctttaaaccctcttcttttccagtgattggcttccccagacatgatcctgtgtggagggctatgtctatcactaacctctcagaattctcattagcaacttcactgagacctctagccattatggggcatctgtctcctgaaggatgactctgcttccctcgagttcctaaactacaggctagtcagaaagcaaacgagacagtaaactacgctttctcgttccctacatctggcttaagagtccttttccctccatgaggtcttccaatttagttaggccagccaactgacatattgctcattaatcatacatattaactggagtagttaaacgtttgaaattcaacttctcactctgtccacaggaactagatcttgttttctcaatgtgatgacacatgcttcagaccctgctaattaggactttcccttggaaatttatcctgacatgtttcaagaacatccttccctctggagtgcaagttcattaaattattaatatccttgtataagtcttgtaaggttcactaacataataaaactttctctgttttaaaaaccacagctcattgtgaagggagaatttgatcgctcttcctcataccttttctgagtagcaaataatagagatcataattaataacatataatgccgaatgtaaggtaaaattgtcttactataattaagtcctaagcagttacacaaatataaggaggcatcattctaaacattctaatgcagataacctaaaatgagttcaacagaattcctctgttaagttgtgggagtgtagcacgtgtactatgtaagctatcctccacctacacaggcacctatatcttctttgcaatatggccctttaaaggcaaatctctctggctcccaatgacaatcagcaagtgtagctcagcagcctaactaggaacccttgatgtaatttgcaaagcccagcataatccggccactctgccactcactcttcaccagccagctgtttctcactaagcccccactctgcatctctcccctctgctgacggttcatcagaactttatggctcctagccctgctcctttcaaatctgttctgaagctttccagaatactcttaaacagttagccttcctatgtaaatgttgcttccctctcttggtgtattcttctataagttttgtccctatccaatatttctatattaacatttgtttattacatatgcaataaatactgcacatcagtaaatatcagtgatggtccacatgggtagcttggattcaagtcctaaatctgttgctcattagttaacctttaataaactgctctgtcatacactcatctcacttataaaatgggatcctattgaaggaaattattaaatgaatatgtataaattgcttttagtggtggattgcctgtggtaaggtcttgtgttatctcttacctccattgcccacagtggaatataagattcaggattcaaggtatttccaagcttatgtgtttcttggatggtaaataaatgaccagggatatatgagctcaagatgaaaaagatgtctacacaatagtgaaaaggtgacaggtaagcaagggagaggtttacgggacaggacggacattttatgtaactgaggcagtcatttttgttacatttgcttttaggatgtgtacgactacatgtagctttactagatgctaggaacagagacttccctagaggggaacagaacaaaagtcaaccgagaacacaagaggaaacacggaagtagtccaggggatttacagcagcacctgccttactcggaagcctcacttttattgtgcaaactagaactgataagagtgtggaagaggcagattgataaggacagagtctaaattacttttacccacttgcactctcaactgacactctatgttaagtttaagctgtttaagtgaaaaataacactcaaattaaaaaatacatcacagtgtctacacaatggcatgacccacatgtttgaggtttgaataccaccaatatattttccggatatttaatcaattgtgcaagaaaaaaagggggtgggactaagggatacctgcagaacacactagatgcagaacttcatggtaggggacagaaataagaactacaggtggcacgtacagccccggtgtgctggccaaagccactcctgtcccatcttgtcactaagggtatataatcagccatcttgtcactaatggcatataatcagcttaatgccaggcacctctaagctctttgctctttcatgggtcctaagattccaattcctaaggatatttcttctaaagtgtctaactccaaaactctaaaactgtgccctataagtaccctgatagaaatcacaacgtaagaattactagcagtttcttggtgctgatgctggccagtcttttttttttttttttttttttttctttagggctcattcttgttcctctgacttagactctggccttagactttgtgaactttgtgggtaaatgtcaccattttgttttaactttagcagtcttagcaagcaagacactatcagttgcctgtgtcatttatccttcttcctgcagatttaatctgctctaaacctgaagctagacacttaaccctgctaaagagtgaaacataaaaatgcacatcactgaggaattatgaaggggattggttctggagatgaggaaagctggtcatcaccgggaccaagacagaatctgaagagcagaatctcccttccccagtcgggggacattctaaacacgggggacagtcccattttcaccatgtcacacacttgcagtttcctctctcacccctgtgacacaaggatgtcaacagacatcacagcatattcaaaatcacctccagccaccctctactgctgctccccactagggacaaccaggaagatccaagtgctcagcaaagagccagaaagtgggggtgaaagagcagggctttgccaaggtagctggatgtcccaacaaaatggagtggaagtttgggttaacctgcatagtcagtggagggagtgaggtaaagggacaggaaagcaaggaaggaactatggggagagcaagtggtaagtcaatgtgcctggaagacaccacaaggctgcctgttctggaccatttcaggagctgtggtcactggaggactagaaaaggcaggaggagaaccagagaataaaatcaatagtacagcactagacaagagggattcattccaatattccatgctacagaagtagctacagtctacaagctatcttctatttctttcttttttttttaaacgtaaagagaaaaatccagaggttcccaacacatggaagtggcaggtgcttgagaaatagaaacactagtgatgctggttattataaattgtatatatgtatcaaactatcatactgcagcccaccaatatatacaaatattgtatgtcaaataaaaataagtaatgttaaaaaaagatttacagaagcagaatagctgaattgtgaatgattagaatttccccactgagggaacattaatcctattttaatgaagtattattatttattcagatcacagtaatatcctgaataacaggatatcccaggggtggagttaggcaataatgtcaggacaacttgtagtctgctttgaaaagctactattagtttctagtgaagtccatctaacgaaaagaaagggtagccaacaagttgatgcaacaggttaaaagcacttatcaccaggcctgaagatccaagttcaaagcctgggaccaacctaatgggaaaggagtgatgacttctctggaagttgtcctctgatttccatacacacggtccttggcttgtccacacagatatatgcacacacacgcatgcatgcatgtacttgtacacaaacacatacacaaaaggactggttaagagacagagagacagagagagaaggagtaatgtggaagatgtaagaccctgttgcagtgcaggagtatcaactcctcttgccaccattctaaacttaattcagatctcttattcatactaaattacatactctccccagtccttacaagagccacttgactgatccctgaagtaacaagacctctatgcctggtgtcgttgctgtcatagatgtatttttaaatatctcctaagatatgaaatgcacttgggattcttacacattccttacatgaaaattcattcatttctcattttttgcatatatcattgattttgaaacttggtaactctttataactttggtcgtaaatctgatttctgtccacaaaagtaaaaaagaaattcaaacaccccagatagacagtagtgttttcctgtgtaatgaacacctcattcacagttgtgtgtgccagtcaagaccaagactaatcttccttaacatttctctgatacctgctcaggctgagctggggccatggactttgtgaaagccagtcaaaagagcagggagccatcaaaaggagccaccttttcactcggcaatgctgaaacagacacagttggacacatatttcagcttgtgggtctggtgcctctttaccacccttgatttaaatctaattgctgctgtaactccttctttgtcctcataacgcttgccaacaaccaaaaccacctgtcatataaggaccagtagcccattatctgcattcttcccttcttaatgctcatgcagagtgaagtgtttataaagcaagtgtctaatttaagatgcacgtgcgctgttacttcaagtcatcctggaaggatccggttatgttttaccgttgcaagtttgcagacgccgttcatttaaatagccctgcctgcctgcctgcctgcctgcttgctgacagtaataaccctctgccagcctttttacttttatttttatctttttgcaaatactgatggattgacaatatatcctataaataagtttgttacattgtgagaatatcttggtctcatttttaaggtttattaaaatgtacattaagatatgtatcactagtgggtggctttgttaactttttttttcaccaaatgaacacattcacgtaagcagcaccctgttcaagaagtggagcataaggaaattgcctttgtggtttctcccataaatacccgccttcacattgggtcactcattgtaacctctaaccacacacactaagtctctcggcttggtcttccatataaactgatcaattttaagttttacaatttttacatttgttttactttttaactgtgggggcaggcaaggatgaccgacatgtgcacatgagttcaggtgcccatgctgacatgtagggccatcagattccctggtgttacagatggttgtactaaccaatagccatttctccagccccaacattatgcttctaaggaagatgtatattgttctatatagttcaagttcattcacttttaaatgttaaatactactccataacttattttgactcttatgatcatttgactgttaacattagtttttatcggtctatttgcatagctcagagtggcttgtacatttttaagaacatattacttattttttgttgtatgtatgtatgtatgtatgtatgtatgtatgatgcagtgggggttggtgttgctggcatgtacatgctatggcacacaggtgccgatcagaggacaactgtttgaagtccgttcttctcttccacctctctggggattgctatcatcaaactcatgtcgccaggcttgtacaagctccttactcaccaagctgtcctgccagctccgattgtacttttgtaaaggatttctcttgtattctttagaaactttctttgcaacattaccaatactttcatatgacaaactggatatttggatagagtagtagaaagatagaggatgaaaggaattagctttttgttgtcgttgctaccacattctgaagattatagcatatagcataaaatcaaccaccctttccatgtttaagtatatggtatattcacattgttgagaaacagaccaccacttattttcctcctcaaactgaagttcccctttaggaatcccctctcttcttgccctcccatctctgggaagcaccatctgctctctgagaatttgaatatttccttacccatagaaaagaagtcacaaagtttttgccatcattcgactagtttatttctctgagtcatatgatcaagttcctccctggcccatgttgtaccacatgacagtgcccttcctgctagaatgaggaccagcctaccatatgtgtgcatcacaccctgttcagtcatctcgccacagaaggacacctgcagcgcttacatctcatgttgttgagaatactatcccagtgaactttgtgttactagagtcctaggacagaggcctaattgtagggggcccaagagactaaagccagttacccagcaccctgaatttctaatcaaagaaataactggagggtagaaacaggaaaataagttttcattgtagtcacactaggaggatatcaggtgtggtgacttcctcacatcattcatgttactggcaatagaagcaacaaaagctggggaccaggaggcatgcacaattaagcacccttgcacagactgtggtttgactgattgtcatctcaactccggctctgatggatttcctggcacagggagatgactgcctgcctacaaagctcgctgtttatggaactcgagggtaagctggaaaggaggaatagctaaggaaaagtacatgctggagtgagggaagtctgtcgggaccatgactggagacttgggtgctgtctcagtggtctagagtagagttttgttaaatcaggcagtcacgtgccattagtgactgtgatgttcctctaagtcaagaaaatatctgactcttacctagtgtctttagcctcagaatgggagagaattaactagtttaatttggaagccttgtattatgagctgtagacagacctccttaaatgattagcatgttttcatgaatcattgaacaaaaagacaaagaaaggaaacaagagcaaaggagacaggccaagtaaagaggcagagatcccaagcttccccctgctaggagttacctgtgggctcaagtgcagggtcagcatagaagtatgtactggggtgtattcccagagatcccatgccagttctccttttactttactgaggagctccatttacgatggtggcactatttgatgatcctgcaagcagtctattaaggctccttttcccacatccttgtcaacagttgttatttcctgggtttttgtttttatttttattcttgataagtagcctttctactcattgtgcaagttgggaattttataagtaatcacttttgtaatcatcaacaaaccagtgacctttatagcaacaaaacttggatacagacacagacacacacacacacacagacacacatagacacacagacacacacacagacacacacacagacacacacagagacacagacacacacagacacacacacagacacacacacacagacacacacacatacacacacagacagacacacacagacacacacacacagacacacacacagacacacacacacagacacacacagagacacagacacacacacagacacacacacacagacacacacacagacacacacacaggcacacacacacagacacacacaccgtttttctataagaaaagagagagctagcccagcctgcctgcttctgaacttgacaatgattattttcagtttcaaaaaaaatcagtcaactaattgaacatttgggttacatttatgagacgtgtgggctctatagggctttttagggatgctgattcccagttctgagaaccccggctttggaaactctgctatggggcagagaccaggcatggtaactggctttctccgtttgagcatatactggtcttggatcatgaggcagacgtctaaattgtagttcaaaatctttttactgttgccaaacagaaaactctctcaggtttccagggaaaccatttagagtccatctatactattatgctttctaccttggttttcaggactgcattagattagcttgatcataataaggcaggaatggtagatctctctgtgctgggaactttgtgaaatgagatttatcaaagttgctactgaacaaatagccccctgagagcagccaccctacctctggcagccttccctagatggcagtcgtctgagagagctgcaggagatcccttatgaatatccaagctcctgctgtttgccttgctttacagtgggccttgggatgaacagacagaaacaggagttggacatggagggcagacaagtaagaagcattcctccaccaacatcacagccttctccccaacccgagcatctacgtccccacctccaagaccccgtgtccccagccagtgctgcagaacttgatgaacaaaagcacagtttagagatcacactgggctcttgatcatggttctcagccttcctaacgctgcactcctttaatttaatacggttccccttgttgtgctcacccccaagcacgttatttcccttgctactttctaactgcaattttgctactgttatgaattattacgtaaatatctgttttccaatggtcttaggcaacctctgtgacagggctgttctactcccaaaggggtcatgagtgacccacagattacaaacctctaccctagagaaaagagaggtatctgattttagtcttcatacaaaggagagaggcttgtgcccgttgtgttagcaaaattattagcaataaagtactccttgaattttccccccgaacaatataatttacagtacaaaaaacaaaacaaagcaaaaaccaaaaaccaccatttttttccttagctctgaggtagactctagctggtgtgagtgtagccatagccttacagggcagaaataagagagaactcctggggcttctaggaggaagaaagacaataaagacaatgtctagaagtaaatgggaactattaacatccatagaaattatggatccaatctctctctcataagctaaagcttccctcacgattctgtctgccttgtgccagagtgccctctgcaggtcactgtgacctgaaatcccaaggtcttgccagctccctatgctatgcgtactacagctaaagggggggttggggtggggggagtgtttctctgtaaagcacacacttaaaattgttcaaatatgcttctggaagttaccagacactcaggccttaagctgaaaatatgtgttggctgaagttaccctcacaaatatgttccttcacgtttataaccctcgcaaatatcttacttgcttgtccaggcttagaaaggatgtatgagcagttcagccctctctgactctaacggcatgcacagcggggctctgacaaggctaatgtaacagatcatgtaaatcggtggggaaagagggagtctggatgcttgccctccatacagagcatggatgctttttgctccctatcagtgttgttatgacatctgacacttgccttgtcttaacataaactctgtgataaaaattgatcaatagcctgactcccctacttccagcccaaacagatactcatttctcttttgaagaaaggagaatgcaaacaaacctgagcctgtagttttaactcgacctgatgcatgattacagaaggaatgggtcctctgcttaggtgacgcctttggttctatttctaggactcttgtgatttaagaaactacaatgcttctgtttctaagtaaactctttagtcttgcttagtcctcagaagcaacagacttgcatttagtaaaacttaaatatatagactttcagaaaatatatactgcaagactagatgtatgtacgtataatctatattaaatacacagacgataagattatatatatattccaatcttacagttccttaaagaaagctagagtttacagcatttaaataggcagcatatgaaaacatcactaattgtatgatttttgtaatttaatattttttggttgttgtcctgtgaatgtgaatttgggagtatttatgggaagggcaggttttatttattctttggcaatctcatacgtgtctgtaatgtatttttgatcatgtttgctatcattatgttttctccccatctccttcagaactaatctttcccaaccaactcttctcctgctttcatctccaagaaagaaaaagaaagaaagaaagaaagaaagaaagaaagaaagaaagaaagaaagaaagagagagaaagaggggggagagagggagagagaggaagaaagagagaaagagagaaagaaagagagggagagagaggggagggagggagggagggannnnnnnnnnnnnnnnnnnntactaaaagctttgaacttgccctccctggagtgaatgcagcggatggtggcaataatgaagatgtaggaagtgataatggtcagaactgtgacaaagacattcagtgtagcaaaaaatagaatcaatatttcattggtatacgtattagaggatgcaagtttcaagaggggaagatcacggaaggaaggaaggaaggaaggaaggaagaaatataggacctgctgggcttggtgagagttgtataggtatgaggcaagcatgggagtgggaatatggataacttaccaatgaccatatccctgagggaagctgactcgccgggcagccattaagcttctcctttagggctgacctcctgaggtcttcccctattcacaacagaatgttgacagctaaatcgtgtgcaggtctgcgcaaggattcgcagctgcctgagctcatgagtgaaacagctgcttgaaacagaagtccttaagagtttgagctttacttatctcccatagcaatgggcacattttatctcccgaatcacaatgtaatatttgtttgcttacctacagatccacctggcatttaaacttcctacccaatttcaagcctaaataaaattagtgaatgaaatgggtctgtctgtgggtcttagttagggttctattgctgtgaagagacaccgtgaccgaggtaaccattataaaagaaaacatgtatttttggctggctttcagtttcagaggttcagtccattatcagcatggtgggagcagggcagtgtccaggcagacatggtgcttgaagagctgagagttctacatcttctgaaggcaaacaggtgtctctctcctgtactgggtggagcttgagcacaggaggcctcaaagcccacctacctagtgatgcacttcctctgacaaggccacacctactccaacaaggccacacctcctaatagttagtgccacttcctgtaggccaaaccacagtaccctacttacgctcacaactctcacacaaaccaaaagcattgaaaaggaggagctaaagttgtgctgtttaggaaacaagttcagaaacgttcctcattcagagcatataaagcctaagaaaatgcttgcttatcaaataatttaactaggacagggcctggtagcacacatgctttcaatcccagcactggggaggcagaggcagaggcaggtggatctctgtgagtttgaggctagcctggtctacaaagcagagttctaggagagcaaggactgttacacagagaaaccctgtctggaaaaacaaacaaacaaacaaacaaaagaaaaacaaacacaagtaattaggaccagagcgaggacccagtgggtaccccaggaagccatatgttaagctgaaatggcagacctgaatccagaagttatattctgacctctactcagaccccatggcatgcacagatatacaataatagcaaataaaattaaaaataatagcaactaaattcttttatgtaatattagacatatttcttaagcatgtaatattagacatgtttcttagcacaagcctgcatttgtggccacctgtaatccaggtggttataaatttgggagtataaaaaatgagctacaataatgattaatatgtaagaattatacactaagctcacttatctagacagaagaaaagagctaggtcacattctgtaggtagaatatacaaatttgtcacattctgtaggtagaatatacaaatttgtcaatgcaacgcttttcaaattttagtaaatgtaagagatactggaagtaattctgacatacaaaatcatggctctgagcccctgggtttcttaaccagtttcttaactagtcaatccagtcttccagtccttgggtacctcctctaaaattagaattcagacccattttgaaatattttttccttttctatttcctttccttcccttcccttcccttcccttcccttcccttcccttcccttcccttcccttcccttcctttcctttcctttcctttcctttccctttcttcctcccttctttctcttctcttctcttcttttcttttcttttcttttcttttcttttcttttctataatgtatctgagttttgcttacactggtgcctatacaccacgtacctacaatgcccatggagaccagcagagggtgacagagctaccagttttgacagatcatgtgtgtgctggaaattggacgagttttctcaaagagtagccaggacttgtaaccactgagccatctctccaacccctgaaaagcatttattatttcacccaaattgcactttttatttgaacagaaactgcagagtcaccatacaaaatggtggttttaagtcatctttcacatactgtcctgatattgccagagtgtcaagaaagtctgcatggatcaagagcaattagaatctgttcatctcaagaagtgtatttcccaccatggtcgtgtaaaaccgccccacagcttcaggattcattgatgttcaagagtcacgtgcacttggaattgtttctttttatttttttaactgtcttccatattcctactaaatattgttgtgttaaaatgaaattaaatcacaatacttataatctatttttttttttttggtttcaagggaagacgagggaaaacaggacccccaggaaatccaggacctccaggaccacccgtgagtaaataggctgtgctcccgtggcaaaacagaacctgcttctatttccctttatccgtgcaagtgggttaggctgtcagcagtacgttggtgttgactaatatcaattacaaaactaaaacaaacaaacaaacaaacaaggcaagagggcctgaattgaattgggcaggtaccagctttgtagctttttttttccctaaacactttataaaattttcagtaatcattttgtgttttgaagaagaaaagtgagggcacactaacaagcgcactttctgtcatttctaaacacttgacatggcttcaagacaagtgtctctgggaaggaatttaaatggtgaaggcctgtatgtgaagttggccaaatgcctggaacaaatgtgctggactctggagtaattcccaactactgatagatgtcttttctgaagagccaggaagactaagaaataggtgaccacacaataggattcagagttctcagctcacaggtttcagtttgttgctaacctaacgtgtttgggggtggtatgggcataggtaaggattagcgtttacactcagccatggttctgattcagagcactcattaaatcttgtatagggaataaaggtggtttatgaactttttaatataataaaatagccaatttgttagactgagaaaaaaaagtcatgtagactataaaaaagggtttatgcttaggtcagcatttgcctgagaagacatcagggagctgagccactggttggtttctgcttggtaattgtgatttgtgggaactctgactcccctaaatgactaaaatctttcctttcgtataaacatcatccaaagttcccctggggtacagtcagttgtcaacagtttgagaggtttcccatcataggataaattgatggtctgtacctaactcactcactgtctggtcgagaacgacattggaaagaaaagtaagtcctgtaattggctctctgtgcttttccctcagcgaacgctttctttttctacaactcccgaaagagagctgctatttcccaaaggactagaaatgaagagagttattcacagcgaatcatttcaaggtcacaataactaacattttgaacaaatagctcatcaaaaaaaaaaaaaaaatctaattgcacccaattcacactgttcaagggtttcacaaacatctatttgggggtcctactaaatgcttaactgaaaccggacttgaaaaactgaataagaccctgcccttgctttgcttttaggagatttgagttcaggtcagaaaaatgtggggtgcagaagaacattcaatgaagataacacagtttgtttcctggaggaagtcacagagaagaataaaggttgaggctttaaagattgagaaataaaccaaagagagcgggggaaggagcaagctgggtacctcttccctgacaaacatacacctcccccaccccacccatacacacaccacgccacaccacacccctacatacacaccaccacacacacacaccacaccccatctccaccccaccctacaaccctatacccccacactgcccacctcacacacacccacaccctatccccacccctacctacatcacccacaccccacccccatcccacccatatactactccctgccaccacccccccacacacagcatactaccccacaaaccctatatgtcccccacaccacccctccataccacatctccaccccaccccatgccaccccacatgtacacccaccccacccctgtcccccaggaaagaagacagtgtgaacaaacacccggaatgtaaaacctctgatgggtagaggtgggcaccctgccacagacagcccaggcacagccagaggccaaaaggggatgcagtcaaacctttccagggtcctggcaaaccccgtggaaagctatgagagtaaacagagggcctaaaccagagagggcctgggccagatttcactgatggtcactctagcaacatagtggaagcagatggctgacagcaagcaagaccaactctagctatttattgcttctgaagtctctgcagggcatttgtgatagatagctgcttggctgtcctgcagagctatttgtatttgatttccatatagagtgcaaggtagagaggagcagtctagtctatttttaaatttttttttctgtcttttctagcatgaaactgggcttcacatgagccgtactccatgacagggaataaggcggctaagagaacgggtggtcgggcactaaaatcttctggttgaggtttgagatggtgacggtacgcgcatcttcccagtggcttagcttgcgccattcccaaagcaagcatgtgaagggcttatgacaacttcaaaggtagaaaaataaaaataaaaacaaagaagaaataactttacctcttatgaggcagtgactgaacaatatagccctcaagtgaatgaatagctgagacatttgtaacattatatttgtgcagttttgttttttaaatacattagtcaatttgattctcagaaagaacctaggaatggtagtcgtcaggagcgctgggcaagcctttgatggcagagtacttgattcagtgtcctcctgagaccattcttccccttggggatttaggtgctctctcagtcaaaggcagtgtttctctggtggaatgtcaatgcagacaaaaggagtagagactggggtaatgtctttgaggacccaaggcaactcaaaactcaaagtaactgaactgccttagtccgtccttgacctgaggttctttgttccgggaacaaacttattttctcacttccttaagaaatttttatacccaaagacaagtcatttcaaatgaataattttctataactttagagtcagctagtgagatatgtgtttatgtttgtgtgtaggtgggtgtctgcatgtgtacatgcaagagactatctatgtacctggaaaggactatatccaaaaatcataataactaacattttaagaaaattaaatatcctggggcggagaacaaaatcctaggagatattgactacccatatttgcttttctgttactgagataagtcactctgactaaaggcatcttggggagaaaagagtttatttggcttatacatccaggtcacaatcaaagaaaagtcagggtaaaaactcaaacagaaacaatagaggcatgctactcactgactcgagcactggcttgctcagctagctttcttatacagtcaagactcacctgcctagggatggtgccacccacagtgggcttggaccctctcatgtcaatcaccaaccaaaacaatccatcataggcatgagcatggccaatagaagcgaagccattcttcatttaaggttccccattgcctggtgattctaggttgtgtctagttgacaataataactaaccagggtatttactcagtctgttgaagtaatgttactaagttatgagacactgtatcttgaatgtcgtatccattagtacagatcagttcaccacatttcaatttcatcatcagggaaattttatcttttcagggaagacttacttgccgttcatacatgtaatttacagttggttgccttctgttgaacatatattttaaaatgattttgtacactttcctgtcaaacagcagacctatcaatacagaggtaaatacttccaaatttcctaaatgactttgccaacttgtcattttcttttttagattaatatatcattttccctctccttccttcaaacccgcccataggcccctccctgctctctttcaaattccgggcttttctttgttgtggtaattattatttggggggaggggagggaagggaggttgctacacccctttgttgtctctaaatgtctgtagggctgctacccctcttagactgtagagtttgcaaataaaagacacaaaaacctttagataataagccttaaagtgtcagagctgggcagatatcaaccttctatgctattttatctactttcctgtggtgatatcacctgagatatcacttgccatgttctgcctgggccactcccactcccacaggaaagctctcatggccatgagctccaatccacccacctgtcgtcctcctctctccctcatcatggtccctgcctgagaccccaagcctggaaaccttccctctgcccctctcctctgcccagcccaggctgtagacatattttttaaccaatcaggaataacttggggaacaaagtttacacagcacaagctgatatccataagaatctgctcactttggatcaaccaggatcttgaggtatacaatttagcatttgaatacaagtagcaccagaccaatgccctacatttctttccattaatttattgttatatacatatatgcatatgtacatatatatgatatatatgcatatgagtatacatatatagtcctaaatataatctgcttggtctctataatgatacttcctttggtattagatagccaattggtgtgctcttcaccaaagaaggctttttttttttttttttttttggtcggcccttaataatgttctatgatgaggcctacaatctttccctatccaagttgatgtctattgttgctgtttattctagtttacctcgtgcttcagccgttgtgtggtgagactttatgggtgtagcttctgatatttctcaaagaaacagcctaccgacagactgtgttcctctggctcgtgcagtcttgccaacctctttcagccatgatccctgagacttagttatgggagtaacctgtagagtatcaatgggactgggcttcacagctctacgctttgatcagtggtggttttctgtaatggtccccctctgttgcaaagaaaatctccatgctgaggcatatgggctacacttatcagccgagatactggaaaatgatgtgcggcacctagctgggtggagaggatgtaggtaagggtttgggtttttaccatgtcgtggacctagagcctgcaaaatccgagagcacagtccagcactctggcaagagtgttcttgaactgtagcatagtggaggcttctggagtccctcctgcctcttacaacagccactgatcgtctcatgagaacctcacactcatggtcccatctgatagtaattacatcctcaaagtgccacccccatccaaacactgttaaccgtgaatttagcgattacatttccagtgcataaaatttgaagggctcattaaacaatagcagaaggaggccgtaagcagagagatctgaaatgagtaataccttgagatgtgctaagattataatcaagaacagtttctcagagagacaaaataaaagaactctaaactctctcgtcaaagaaataagtccaacagaaaaagtaagaaatgcagtaaaaccagaaagctttattacagcacgagctcggtattagaagccatttccagggtgttatggaatcccagaactacctcaagaagctgaaattaccctccttttgccacggggtaagtggtccttacaaacaccccgcaactttcccggaagaatggaagtatatgatgggaagcccaaattcagactccggatctgagtcccaaactcattgtgcttgaggacttccaggctgtgatctgatacgaaacggccttactttaaagaccacatacaagcatagtttgacttttctatggggatccatggcacccatctcataggaaagcaaagtagcatagggtatgtgggatgccatcttcctgggcagcccttcctggaccgtgcacgtgactctactctctctgtgaatatgaaatcatagcgcttgccccacccacttcccacagtggctaggaggaccagctgccatgtatgtatatacaggaactttctgttgtatttacataactctgttagtattgttgtaaacatccatttgcaatgtaggtagaagagatggccctatactacaatagaatccacgtggtctttctcttctcgagtttcccatttttgtgcagtcaacaaaaatgcaatatctacccttgacttgcttaaatgatcactctgcgtcttgagtacttattctctgtacgtaaattcactcttgaaaagacagaaattatttccaagtcactgctacagccgaaacgagggactcgagggtattttttttctcccctagctttacagtcgcgttctggcttacggagctggtttgcctatgactgagacactgtattttattacttgtgatctcttctgagtctcacccactgctctttagactccaacaaaaacatctttccaaaacagttttctggtgatcttatctgcgtatgcaatggaaaatattgaccttatgttactataatgaaacttgggaagccagaccgctcggaaagccttagtttgtaagaatttgagttcttagtttccttcaaagagattggaaagctgtgaaaataagctggagtaggagggaaagccagagaagttaatgagccattaagggaagcatgtaacagcccacccctgtgacgttagctctgcttctcatttatcatttctgtaaggagcattgattaaaagccgtgttaactctaaaatgtgttatcattctttctattgcaggaatgggtttgagctatctttattttctttctggcattgtttctgtgtaccgtttcattattgtggtgtgagaattcatcagtggcctcaaatatgtcacatttgagtgcagagcaattgagtttgaaaaaaattttttttcttttcgagaaatatgtaacgtgggccagcagcgccctctactgtttccactggaaattttctaggcaaagatgcttctcagagtgcagatatggacattgtttttacacgtttgggttttaattatcagtgaatacagttttcgaatcttattttcatgatttgtggcactctatgcttttcttttactttaaacataagcgccatcctatccacaatagcttttaacatcagcctcttatgttcttaagttgaaaactcagccctagccctggcttctctagatgcccatgtatggtaaaacgatgatgttagctattaacattgtggagctcattacaaaaaaagcctattttccaggtcaataatctgatcttaaatatgtaagtccattttatttatgctttaatttaacatcactgtaagataatttctttcacccttaaagaaagaatcatcctatagtgataaagtctgtgagtgatttaacatcaggtgatgcaattacatgagaaaatttagggtgcaatttttaactcattttcaactgtagtctcttagctgtgacttcattctccgtggtttcggtaaccttccttcaaccatcgcccagaaatgtgaagcaaattccagaaataaaatatttacaagttttcagctatacctccatgtttagtgaaatctcacactgtctcattctgccttcctgggggctgaaaaatcacctccttaccccctggatccagtttccatatagcacctacccaggagtcattgcgttatcagattgaccaccatagtatcacaaagtggtattacaacaacactctctttacttaactacggcctcaatttcaatggtagtgaggctgctgctaaaatgacaaagagaagtggtaaagtgtttcctttaaatgagaaaggtgaaagttgtcaacttaagggaaaattgtatgctgagatttctaggatttacagtaaaaacaaatcttctatttgtgagatcataaaaagaaacaaatactgcttgttccactttgtagttcaaacttccaaaacatgtatacaaggtgaacacttagcttaataggggacatttagttaaacatttagtttaaatggaacaaatgttaaattataatttccctgaccttaatggttgcttagcatgggctacgtttctcgggtttattctctgcaggtaaagagggattagtgctattatcttctaaccactaccttaaacaatgtatatacaatgattcaagaaacaaagtagcaaactgcagaagtctctgtctcagtctttacactctattgtagggaaggaagcatatagcacgagttaataaacattagagacaaaacaatttcagtgtaatgtgaagatctctatgggaatggagtgattaatggaataagaaatctcagaggtgttcttctggtcaaggtagcctgaggaagtatctccctggtcaataacatgatttaagaaggaattagccataggatgtcaatagacaagaacttcccaaccagaaagctggatatgttcaataaatataacagaactgaaaatgtggttttcgaaaaggcttggggtgggagcctttatcacgtaaggccttgtaagagtgagagtcggcaggtgaaaatgagagaacttgggacttgagtggtcactgtttccttctgttaaatctcatgtgtgcgtgtgcgtgtgcgtgtgcatgtgtgtgtgtgtgtgtgtgtgtgtgcgtgtgtgcgtgtgtgtgtctgcagtaattagctttctggttgattttgttggtgctggtgattggttgttttaatgtgatgaaatgattcaaataattattatgaagatgatttctttttagtctatcatttttagtctttaattaggcaagactgtagacttgtttgccaagagggaggggaaaaaaagctttgattgattgttgactgctcaatttcaaccatgctgtgaacacaaagtacatttttttcattgaagatggaaatcctctcacatataattcagtctttttcccctacctccaaccctgatgttttcctgctaataggctacaggttaagtcagatggcagtcataacaggcaaatgaccaccctcaaagcatcacagaaactcagaactactgcatttgacccccctagtctattccagtccttctcttgtatgtctccatctctcgctctgttacaaagagcaaaagtaagatgccactgtatgcaatacaaagcctgactacctctcaaagcaacctgacaccctaaaatacacttgggctgctgaatgaggtaggtgacaagacatttcactgcaacatcattccctattaaaatatcatatgtataactgtgtgcattttgaggctcatgatgtttcaataagaacctgattcacttgcaagccttgaactcatcaatgcccttccaaatgttcatttcatcagtgaccctctgcctctgtaccaactgactagaggccacacactctaatgacaatatcaaaaagaaaataaacctaaccatctatttgagccaatgggatagcagtttcatctctgattgaaaaatatgatgacatccatgaatttaaaaacacattcacatagtatgcaaggggagagagggaggaggagagggaggggggagagagagagagatgatccatgaattatttttactgccacttgtgcattattggggtcatggttccagacaaaacagctgttgtcaacattgctaaaattccagtgtcaccttgaggccacggagtaagcaggcacgcgtgtgaaacagctgggatcagactgagaattcaaacacccacactcggatccgagttcttgcttcctttcctccatatgagcagcagtagtagtgggacgttactaacacttttctcactgctaaaccttttctggttatagccaaataatggtggaaaaggtctcgtcttcatctgctaccgactgcatctccatctcatatcatagtagctctttggactggcctatgttctttctaataacagtgaggcagctttttgaaatccttggttcatttgggactaaacataattagttgggccagtgtgtgaatttatcatgattccatgatgttgggtaaatgttacagtctgaggaagcaaaatccaatcagatttatttgaaccttttatgttcgaaaacgaaactagtttctgaaataattttaaagttcacatttggctcaatagctccaaaagggatgccaaatcaaatggctatttagttttacaggtgtgtgtgtgtacaaatatatatatcagcaagaaaatatgatctcgattttagcaagactctaggaaagactccagcaatcagattcagctctaccctatgacatcagtttttgtctgcatgacaactatggtttcgtttagcagaaagaaagaccaagaggcattttgtgagtgaagatagtagtgtcttgggggcgttgaaattgaagaaaatctatagaaaataagatatgaagcaatttctgatgtgtctactaattttgttaaatgagacaaatatctagcgaatatggtggatggttaatatttgattacaatattatgttgtcgcttcctgagacattttaatatgatgttttattacttcttccagaactcatgcattttgatcatattcaactctgactcctgctcctcactccttcctatccccagccacctcccaaataagtgtttcctgttttaaattatccaagtatactttgtactatccatatgctcaagggtgttggaccatccactggcatatgaacctacaaaaggctacacccctaatttcttcatatccatcaactaagtcagggatgggagcccataaccctccacctccaaattcataaggctttatcattttattttatgtaccatttagaatccttaaagaattttgcaaacaggaaacccactctacagacttgctaaaggtcactgtcactaatcgcgtctttaatcccaaggtcaccagtgttctctcttccagaacccctttgtgcgttggagctaagtaaataagcaaccatcctccggtactgtcccacagaactaccccgagtacacttttatgtcacatcgaggttcagttgtgtcacagttgtcatttgcagactaatcattagaacaatatggaaatgagagaaaacggtatcactcttgagggggaactagagactcgatctccctacatataaaacctgcaggttcccattgtctacagcagtccacaatgtccccagcgattcaaatttagcacatgctggtcgcctctgtattccttggctgtgtaagaactgccagcatcaggccggttatcttgagcctcagtagtgtaccttagaattgcatttctctgcgcaggaagccttgttattttcccaatgttttcaaagggagtgaatgttatcacttaattacagtaaatggtagcacagagggctgataggtagacgctgcctctgagacctctgggagccgactttattccttctttggtggtatatggagaggttttgggggccagacaagatggaggtacagatgttcccacggtgaggcttctgttggtgatcttttgaagacgtcactggacacagatggttatcttcacacacccggaggcttgctggctttcatgtcccctggtttttatcgtcttgcactggatcattgatgttgcttccaggggtggcaaagacttgaaagattcctgctgttccttctatctcagggatctgacaaataatggtttgggtgtttgtttgtttatttgtttgttccctttttttcgggacctactgcagatagatgaggagggaacactttgtggatgggtaagcagaatggcggtattagccgaaggactcattcatccttcctaacgtccatgccgtgggtgtcagtcaacaagtactgctgtatcgataatacaactaggcttagaggaatcagattgatctctggggggaaacgtgcaccttccaaaatgctgctttcttgccttgggctgtaaagggttaaaaatgtttgcaagtcatagcataatttagaaaatctgttttcacgaaatggattaattacacccattgaacgcgttcactgtcacagccccatcctcccactgccgctccaaaacgacaagtgaaaccagggactgggtaattttggaaaacaatcaggtcacatagcgagtagtttgcttattcacacaaccatgaactgcctatgcttgagttccctcaattacacagctcagtattcaggccagaagcagacaagcccagcgcaagcgagcactttcctagaatacacagaggaatgagtttgaaaaatctccaaagtggcagatggggaaaaaattctcattcaagttctagaagctgcttatccagcaatccctcacctgttaaccacacagctttggaatctcagaaccaggggcactggcaatatcccagaccaagacccccaagagctatagacctttacagatatggtgcgggtatatgccaccagcagagacgagagaacatgaggggccacagtactgaacattgttggtcacattgtggacatcatgggtcacagaactgaagatggtgggtcacaatactgaatatcgtgggtcatagtgaagattgtgagttacagtgctgaagatggtgtgtggttccgaattcggcttcttccttcttccgcgtgtgaagaggtaaattctgcgagcttaaacctgtaatttggtgaaaaggctgcatgacattctcaaggaggtcatgcaggccgagagtaggaaaggagcgatccttatttctgccggtctcaagatgagatttttcagggtttggattcttctctacctcactcttcttttaggcccattcccaggtcgcacttgcccttcaatggtgggtcgcagaactgaacatcatgggtcacagtagtgagcacaatgaataacactactagagattgtgagcatcatcgagaacaggactgaaaatggtggctcacagtactgagcatcatgaataacagtactgaatatcatgtgtcacggtacttatcacgaactccagagactgcccctcgaatgagcaccaggatgcgcaaacttcattgaatgttgaaaccagcgttctctggtaacatctctcaaagccttcagtttccctcggtgccgatgcgtaccaatctctcttctaggacagaccataacggctctgctgtggccttattagaaagatatttctttctctctgtgtgacagcttcacaactaatcttctgtgtcttcgtgctcaacggagtttgcgatcatcaaaattctccccaggtgatactgctcatttggttagagtgtctcttctacctcctttgcaaactgttatttctcctcttctctgaccatagcataagcactgggagtttctacccctcactggtattatttagcctcacgaagcctgttagctattgactgaggtcatagtctacatttcctttgcagctgccttttcttagtccccgtgtcttgtctttctattctaagtcctgggtgctctcattgcttctctgctctttctttttcctcacttagtctctgaatctattctgcgattttccctcagtatcttccccatgacatcttttgaaatgctacagcagatttcggagttgcccctatagccaaatagggtcagctcattgatcctataccccaatgagagattctgtcatcttttacaacagaatgaccccacctggatatttttaactggctttaaaagacggttgggttttgggtttttttttttttttctcctctcagtttaagggaaaaagttaaaaaaaaaataaggctgcaggctcaggcagggtctggattgaaacccaagtcttctccctggctacatgtgagtaagttatttaatcctatgctacatataaagaagagtaccattcattgggttattgaaacagttcgtgctatagtaaatacacttatgttgtggttttaatgtagctttttgacagcctacatttccagtgttgaaagtttgtagcttggagagatggttaaaccatagctttgctttcaaattctttgtttaatcaaaatctgttggcctttgaccttattaacagaataaaggcaatttataaatgaagctttcccggcatgtggctagctcgctgtcttggccttctgccgtctcccaggtaaggatacaacaagaagggcctcatcagccagaggaccaaaccttagtgttcagctccccagactcaagaattatggaaaaataaatctactatgtatagattacctggagtgtattagaatggaatgccttttgtactggattctgtcattgtctaattgtgcagtttggaggaaaaaacatacagttgatttttccatctaccaaatggggaacataaaaataccccttcagttcactgagatgtcaatcaggagctcagattaggttactgcctttgcaatcacactaccctgcaaacctaaaacaaaacagaaggtccagagacttgtagaattaccataagttaagaaatatgaatctttagagttgcacaatcataggctagtgaaatggctaagcagtttaggatactagctgctcttctagatgtcctgagttcaattcccagcaaccacatggtagtttatggatataaagggatttaatgccctcttcaggcaaacagagttctcgtacagaagaagaagaagaagaagaagaagaagaagaagaagaagaagaagaagaagaagaagaagaagaagaagaagaagaagaagaaggaggaggaggaggaggaggaggaggaggaggaggaggaaagaaggaagaaggaggaagaaggaaagaaggaggagggggaagagaaggagaagaaggaggaggaggaggagaaggaaggaaggaaggaaggaaggaaggaaggaaggaagaaaggaaagaaagaaagaaagaaagaaagaaagaaagaaagaaagaaagaaagaaagaaagaaagaaagaaagaaagaaagaaagaaagaaagaaaattcatttgaggagatagtaaagcctagtaccaacaaaatagggattctctgtggagctgcagatataatccagagagtaggtacaccatgactacaaaggcactcctctgagcagcctggcttactatgaagtaactggccacattcctagggtgtcacattagaatcccaaacatgaacactcagtgagtggttcctgaaatcctgtcttcatatttgagcttctgggatttatttcttggtgctgttttgctttgtcttgtcacgtaagtatgtgtgcatacacacgagggtgtgtgttgtatgtacatacttgcttgcactcacatgtacacacatgcttgagtgtgggaaagaaagtcattgtcagcatctcctccctcagtataatctgcagcagacatgggctcaataaaaaatgtaacattataagtttacaaccatttaatttacagaattagatctcaggcgctactggaaaatttcattgagagcaaatattaaacaaatgaaaggattggtgtttcattttatattcatttaatgttgtgtatatttgagtgccaacatgtatgtatatgcagcatgtgtatacttggtgcctgcagagggattaccctggaactggagggttgtaaaatccaccatgtcggtgctaagagtcaagcctgggtcctctggaggagcagcaaagactcttaaccactgagccatctctttacccctgaaggatccatgtttcctaaaaatgaaaaataacaaaataacaaaataaaaaaataccaattctttctcaaatcatttctgtccaaagagccttattgatttttcccctcagagttatagtatgatttcatatgttggagttctagtcaactcccacccatgaaatcgttcctacttaaccagggatccctacatcctttcttctaattgacttgccaagttctcggattaatctatatctgcagaacctgtcttctgtaaatccagaagaagtaaactctttgctctttttgtgaccatatataagtgaagccaacatgagcaagcaagataaatatttataaatatccataaatattttctcataatagcagtggtttattaaattcagacagtatctggtattgggggtgagggcatgcacggggaaccttctctataccaaaactggtgttatgatgttgtaaagattgaaattctgtcctcaaagagatttcatcctatccaactcaagatcaatacatgagccactttatttgatgtataaatgtgctgtatgaaatcctgcacgatgcatcctaagtgaacacatatatgagagaaaaaaatccatttaacattagcttttctgatccctgctgtaacacctatgtctgaggtcttagacttcctaatgaaaattttaaatatcatgagaaaaaaaatttctactttacctttcttactagccatgcagatggtggaaaggatcagtggaatatgaacccaaataactgaccaataaaaagcttcctatttgttctcaaagcaaagctaattttactatacttcaaagattagtgcaaaattcttcacagaagttttgatataccaaaggccattactgtagatacctggaaatccccaaggccagagatagccatgtgctactcaaaatgtatatttgtgagtcctaggagaacctccttatactatcagggcattgaagggctatgcttcattgagacaagtggcactgagataggttatagatgctcactcagcgaacttatgagacaggaaagagtgtttttaacataaacaggaatgcttcagaaatgaagaagagtgaatgtgcagaagttgtggaactgctgagatcttgattcagtgtttagaataggctaaatctaaaccaaacactaggacacatgcaaacaaagttcacgacaaaagttttgggtgtggggtgagacacaaaaatatagtcctttgtgctttgcatactaggtgagctggctgaaaagtgagactatagccaagcaactaaaaagtttaaatttaaaagtagattcaccatacctttcaaacaccaagaatgcatagcccagactgaaatctatcaagaggatattaataggcttttttctacttaagtatttaactactaacacagtccttaacttcacactatgcatctgacatgactggtaatatgcattgtgatctttctgcttttcatctccagcaagaatttagccaaagactccttaaaggctactaaaactattgctgagggtttgaagttcccgaattgaagatagcgttaattctcttttatcaagcaggcacggctttgcaacttcagcacctctaagtttatagaccgatcaaatcagtacacatcatttaatcaaaacagttgagttccaagcaggtgtagctccctggagtttattagcagttaaaagctgccatataatcgtgtactactcacattaactctaatgtcttatatcttcaggtgtgatccagtccaacagtctgagtaaagaatcagagctacacacacacacacacacacacacacacacacacacaaagtcatttagagccatgattcaactggagtcatgttgttggtcactgttgtaggcaagatactctaatattctttatatagtagactctattcagtttatctagaactcttacgtagattaaccaatggagacatgctctctctgattattcccccctcatcagagagtgtggcttatctcattgtcttctcagttggttcttaagcacaggtctttaagagaaaaaatgccgtggggctcctgtgctggggagagttgtcttcatatgtttttaacttctccttttttagaatttgcttatgctctttaggacttgggcacttgtgaaacttgaaacaaatgattccttgagtcttctccagctatgtttcaaggcagaaaagaagacagacagagagcacagtccttggtaatgcggctacaggaatgccttccaattctaagacctcagggtcagcattgttttcttaaccatacattgagatgctcttggtacatacatacatggagctcatccattgttagcatcctctgcttcattggaagttggttctttttcatctttgctatttctttttattgtattgtatttatttacatttcaaattttatcccccttcccaatgaaccccctatccccttccccttccttcctgcttctatgagggagttctcccactcaacccccacccccactcccacctcaccaccctagcactcccctatgctgaggcatcatcgagcctccacagaaccaagggccttccctcccattgatgccagataaggtcatcttctgctacatatgcagctggagccatgggtcccaccatatgtactatttgattggtggtttagtctctgggaggttgggggtgtctgattggttgatattgttgttcttaatgtttcaaaataaccaggcaggtcatttctataccaggtgaagtcagcgtccatgtgttcttcccagtctgtgccagtgtttgctttcagacatgggttcttcagctgtctgagagagcttgtgtaaagtattgctgcaccagtagtctgccagctataaatctctattacatcaatccttgaatttatggtacccaaagtactccactgactaagaagttagaaggaaaatgtcaccataaatgcctatcacctgattaaatggtagagcttaacatttcagatcaaacccacttggagcactattttgtagacttgacattttatgacaagaatatgtgaaaatatggaagtcgcttttgtagatgtgttgatctttgggggtagctgaataattgttcgcacttttctatcggcttgtggctcccgacagtgggctgagtactcgctacacttttacagggagcagacacattgagccacctatactttaccactctgcttccaagagtaagttcaatgatctcaggattctggatccagaatgtattctgtgtcttcgaggcctagctgtattgggtgggcagataaccatctacaaagaagcatacccaattctctcctaaactttcatataggcatcctacaacttctgctattcttttggcacaacccagtttcttttaatgtttgtttttcttttccttgccttccagagttgctttaaagaccatcccctcacacatgtacataacttgtattgatcaaccactttttctcccaacatgcattagggtgcatttgcaatacaattgtgttctgtaatgttcatgtgtactctttcataaatgcatgaagacagatgtgagatgcaaaaaaacccagctaattcttaaagatataataataataattactattactattactattattattataaaatgcatattcccctaagtaagcaatagggttatatttaaaagaaaaatacttatgtccctccatcctgccaacacagtactggtttgtgaaaagtgctaactacaagttttgttgtatgtatgtatgttgtatgtatgtaggtatgttgtatgtatgtaggttgtatgtatgtatgttgtatgtatgttgttgtatgtatgtatgttgtatgtatggccatggagattcattatcatcttgtgttctctagggcaacacttaataaaaagttgatgtcagttaatacaagcatgattttaggtagagagctgatctctgtattcgcaaaagatattgacgttttagggcaatgagactagagaaataaaggatatgattaataaaggaagcggtcataaaatcatgtttgcatgtgatgtgatctatgtagcaaaaggcattaaagattttgaaaatctcttggaactgataatcacatttcatcaaagtagcaggatacaaagccaatatacaaaaccagtcacttgtggatattccaagagcaagcatgttgagaaagaaatatcacaatagcatcaaggaaagtaaaatacctaggaataaatttaatcaaggaagtaaatatggctaggcctatcacaccaatatctcagattcctggtagaaatttctgtcctagtttgctttcttcagtccttcccacaactcttccattgggtctctggactcagtctgatggttgtctgtgaatatctgcatctgtattggtcaggtgctagcagagcctctcaaaggatagccataccaggtgcctatctgcaagcaaatcttgccaccaacaatagtgtctaattgctctggctagaactttgagtactatattgaataaatagggagagacgaagcagccttgtcttgtctctgattttcgtgggattgctttaagtttctctccatttaatttgatgttggctgttggtttgttgtatattgattttattatgtttaggtatgtgtcttaaattccttatctttccaagactttcaacatgaaggggtgttgtattttgtcaaaggcttttccaacatctaatgaggtgatcatgtgatttttttttctttgagtttgtttatatagtgaattacattgatagatttccacatattgagccatccctgcatctctgggataaagcctacttgatcatggtgaatgatgattttatgtgttcttggattcagttttcgagaattttattaagtatttttgcatcagtattcataaatgagattagtctgaagtcccttattttatagggtgtttgtgttttaagtatcagtgtaactgtggcttcatggatcaaatacttgacacctagacccatagtgcctcacctgactgttaatgctgctacccatagtgtcaaattcctcctttatttatatatatttccagaaagagcaatgtgtatgggataacttgtctcccaggcttcaagaataagatattaacttacatgtattgactcgaaaatctacggcctccctcatttcaatggctgctttcctcattatttcatctaacagacctagaatattttactcaagactggatgatggaaaaatacataatgtcctgagaattcacttctggcattagttcctttttaaattatttatttcagcaaggtaatagcaccatttgtcagcctgctccattacctgcaggtcccatcattgtctcagaaagcacaccaactttctcccaggcatttgtcaccccatcctcaagtcctttttgtttcttggcgcagtgctaatatgtcatattaaaatcaactccaatcacaagtcatgcctaggaaacacctggtataaatgttaagtatgtcacactcttaagatgttacctgcttcggaatgtagctagaaactgtaccttaaggttttttcttcacttttcaatatttacgttctctctttaaagataatctttgttcaatgaagctctttaatgtgtccagccatatatatatatacatatatattgagagagagaaaggagagaggagagagagagaggagagagagagagaggagagagagaaaggagagagagaggagagagagagagagagagagagagagagagagagagagactgttctcccccccccccagatctcaaggtctagatgatctatatacaatatgtctgggatagatgactctacctcggcttaagctccctcataaaataatgctaaacttggtgtttattatggttttatcccaaaaatgtaacctttgaaaatcccagagaactcttgtcaccatcccctcctggaagatctagagatggacagctacattaattcttatttactacccagaccaagctggacaataaaaacggccagtgttaaaatgttttaacatttggtctgaaaatccacgtgtatgcccattttaaacaacagtcatcagaaaaattatacatctccatattttatgttaacaatgtgtgtggtagcttacatttctacgatacattcattatgatccattctacaaaaaagcacagaaaataaactgaagttacaaagtcctccctggaattgtctcatgggtggaatggaatcccttttcataaagggcttgatgatggctgagcttgcgaatgtttcctgttgccatttgggactgtactttggcttcatgtaaaacataaccagaacaacaaaagctttagggctctgattatatgttgatatccatgaagttatttattcagcagaatatttgacaaaatatactgagtatattatttgtagcacacattgttttgaaaactgtatttggttttgttttctcattcagggacctcctgggttacaaggactacagcagccttttggtggatatttcaataaggtatggctactttatttccacaacttgtgtgcatagagattttatgtcattacagttttaggaagaaagcattattaggtccttacatctcagtccttgagacaggatcacatatgctcaaagcatctttccatactgtacaccatgttttcaaacttacattttaaaagaatcctagacatattataaaataaatgcttatgctatagttttttgtaagtgatagttcaaagtttgatgataaagaagcaaaagaaataatttagtttggcttggtttggtttggttttttgatttgtttgtttggttggttggttggttggttggttggttggttggttggtttttttgagacagggtttactactgtgtggccctggctgtcctggaactcactctgtagaccaggctggtctcaaactcagaaatctcccttcctctgcctcccaagtgctaagattaaaggcatgcaccaccactgcctggcaagaaataatttgttatctgaagctctgagcagcaccccacctgatagattcctgaaaaccagtaaatgttgcagcaaggattcaagcacatgttcatataacacaaatcaagagcaagagtctccccagggacggagaggaggagcttgtaattaccttgttatcttctccatcatagcttgaataaaataataatagtactgccatggaactatcttagcagcaagagtagccttgattatacctacgaatggtgctggtaacgaatggtgctgcacaggactaggatataggggtgaactcattgggggttcattgttcaaaaacaacatgtggggtctgatcacaaagcaaaagccagtaccattttgtccttcattgcccaaaacaacagtaactggagttcttccaataccagccagtttatcattgataacttgtgccaaagaaaaagttagacactgaaggacactgaaaccctataggtggaacaacaatatgaactaaccagcccgcactgtagtacatctgcatacttcattgcccttgacaagtttaaggttatgaccttgttttgaaccttttcatttgtttagatttttaggggagtgctgttagcatggttacaatatgtttgtttcccgattccttatcaaataaatcaattgctactagcttttttaaaaacattataagctggcaagtttttaaaaggtaagtttgaagtgtatgtaaattgaatcagtgtaaggacatttgtaatgacatatactgttataaaataggacttataataaaagcctcaaaataatgagaataacttgaatctgatgtcacaagtcagctagaaatgtttaagtactatactatattactctgaccatcagtccaaaatggaccaagctggtacccagctacttaaatatctgctagcccttgcaaagctcgtaaggcttgtatttttacaggtctcccaacgctacttctagatacactttttcttaccaatgagtcagtttttccttaaatgaaaatatatggaacctttgtattttagactctgaagctgaaagcgttttagactttaaggttatacttgctgtaatgggaactgagctcagtagctgagtagggacttttgtgagttgcatcccagtacctttgacttatctattttttctcctgagaaaaatgccagttactgtcagcgctaccacagagccaagcttcacattcggtcacatgtgctctgaatgtggctttgtagccagaaggtaatagggtaaatggggggggggggggtctacagcttatttctcccctcaataatacaataggaccactttgactcagaagtgtttacctctacagtgactaatggaaggtagtgtacggaatagtttattctgtttcctcacgagactgggcaagcctcctacactgaagtcccatgatctataagaaaacccacaggcaggacccacactgaatgatatttttgcattgtggccctcccttcttcacaaatcaatgggctgaatgtgccctgataagcaagatgcagttttcacttggcgttctccctgccaacctcatctagttttgtatagtaaggttgttgcattttgcagtttgttgcatgcctgatggcccagctataacaaatgagcacagtgggggaggagctgagattaaataatgaaccatgtattgagacacataaagtgacactccaaggttaaaacaatcttcgcttttaaattggcattgatttatgtgatgcctgctccaagccgtggacctcagctcatcctctcgcagcagctccagcacttgcagagctcagattctgctgaggcagctacccatgggagggtgagtagcacgctcctcatacgtgccccctccctgctccaagctaagagcctggatagttcatccctcatcccagcactctgcgcttatattttggtcctcacacagaatggatctattctcctacacatcccctgcaccatcctgaaaagaaacaggggcataagaaagctctcccttcacagcaaaaatcagaaatagaagataaaaaaaaaaaaaaaaaaaaaaaaagcacaagagcgactcactggagagcaccgaagccagaacgatcacgtgtgctctcacatgaccacttgaggctgcaaagatttaaaagggaatatgtttccttctctatcatggaaataattttcaggcagctgctctcatcctgtttggttgtttgcagagtagcgtcaacaatcaacaccgagtacacttctcccctgaaggaaattctgcttcctacccagccaaaccgctctttattgtcttcagctcagggaagtttagttaaaatttaggctccatcaacttttaaagtctcgagctccctacatggatgtagtgttatctatggaaactgagtaccgaggggatatgtttttgaagatctacattgaaaatgcacagttatttcatcttgcacattaggctctgtctcagcttttagacagggatgtgatgcctctcagctactaattccagtgttcccttctccaaacagctgatccaaaacaaaagatagcaaaatgatgcattctccttccatatgtcaaagtatagcttcatgctggacaaactagaaggaacagccaactcttgtccaaaaagagacattcaaggtcttttcaaacacagaattatatccagtgaggatacagaaagcaatgtcaactggaggcaagctagagtcatcagagaggaagaagccttggttgtggaaatgcctctatgagatccaggtgtaagatatttttttcaattactgatcaatggggaaaggcctagcccactgttggtggtgccatccaagaattggtgatcctgagttatttttttttaaagcaggctgagaaagacatggtcatatgaaagtagtgatatcctcatgctgtaactagctatatgtgccaccatgttgtcaaattaagttcacaatctgaaatcttgctaatcatgtgactacatgtgaataagtgaaacaggttcacaattgcagtcctcaatgaataacttcattttccccatgcccaggatattagagcatatttctaaaagcatgaacttgagttggggtgctgactccatgttctagcagggagtttacgcccttggtttctttcgttaatttagccataggaaattgctgctgactgtttactgtttggaagctacaaacaagtggatggatggatagatagatagatagatagatagatagatagatagatagatagatagatgataaaggtacctccactgatttaactcatatatgtctactacagagtgttccaaccaaatatttctcttctaaacaatgagcacagccttgagttctcccactgcctaacaatggttccaaagttctccttggcatttcccatatgagaacaaaaggacactgctcacacccagaattcttcagctgagcaggcaaactcacaagccacagaccatgactgttaacactgtttctcagagacttctaatgagcataaacaaaaattattccactggtaaaattatttggaagacttccaagaacattcataatggcaccaaggacctaagtcccttcccccaatgacagtagtcacatgaagcagaattacatatctagaagccatgagacgtctgtcttgttatcctgtgagcctggctaattgtcttgttgccagtagcttgggtaaagaaggggagagaaccttacgtgtcaatgagtaacgctactgaagttcaggttcaaggcaggtgcattattaacacaagaatggagcactagggactccaaggaccacggactaactggatttcctggcctgactactgagtaaagacaagtatattgccttcctgactaggctgctgccctgagcagaccttgggcggaactcctttacttgtcccacaacactcagaggaagctccactcccaggtactctaacacacccaggtccacaggattccaggattccaggattccaggattccaggatcccaggatcccaggaccccaggtgcttggtcataccaggatctcaaggtctcagaggcaacttgtctcccaggagctctgacacacccaggatctcagaatcacaggatcccagaatcataggatcacagagacagctgaattctgaggagtactgacacaaccaggatcacagggaggacaggctccagttagatatattgaaggcaggtaaccagatggtgggtggcaagcataagaacataagtaacagaaaccaaggttacttggtgtcatcagaacccaattctcccaccatagcaagtcctggataacccaacacaccagaaaagcaagattcagatctaaaatcacttcttatgatggtgatagaggacttttagaagggcataaataactcccttaaagacatacaggagaacacaggtaaacagctagaagcccttaaagaggaaatacaaaaatcccttaaataattacaggaaaacacaatcaaacaggcaaaggaaataaacaaaaccaaccaagatctaaaaatggaaatagaaacaataaagaaatcacaaagggagacaaccctggagttagaaaacctagggaaaaaaatcaggaaccatagatgtgagcatcagcagcagaatacaagagatagaagacagaatctcagaggcagaatataccatagaaaacattgacacaacaatcaaagaaaatgcaaaatgcaaaaagcttctaacccaaaacatccaggaaatccaggacacaatgagaagatcaaacttaaggataataggtatagaggagagcaaagattcccaactcaaagggccagtaaatatcttcaacaaaagtatagaagaaaacttccctaacctaaagaaagagatacccctgaacatgcaagaagcctacagaactccaaatagactggaccagaaaagaaattcctcctgccatatgataatcaaaacaccaaatgcacaaaacaaagaaagaatactaaaggcagtaaggaaaaaaggtcaagaaacatacaaaggcagacctatcagaattataccagacttcttaccagagactataaaaacttgaagatcctgggcagatgttatatagactctaagaacacaaatgccagtttaggctactatacccagcaaaactctcaattaccataggcagagaaaacaagatattccatgacaaaaccaagtgtatacaatatctttccataaatccagccctacaaagaataatagatggaaaataccaacacaaggagggaaactataccctagaataagcaagaaattaatctttcaataaaaccaaaagaagatagccacacaaacataattccacctttaacaacaacaagaaataacaggaagcaacaatcacttttccttaacatctcttaacatcaatggactcaattcccaaaaagacatagactaacagactgaatacataaacaggacccagcattttgctgcatacaggaaatgcacttcagtgacaaagacagacactacctcagagtaaagagctggaaaacaattttccaagcaaatggtctcaagaaacaagctggagtaaccattctaatattgaataaaatcaactctcaaccaaaagttatcaaaaaatgataaggaatgatacttcatattggtcaaaggaaaaatctaggaagatgaattctcaattctgaacatctatgttccaaatgcaaagacacccatattcataaaagaaactttgctaaagttcaaagcatacattgcacctcacacaataatagtgggaaacttcaacaccccactctcagcaatggacagatcatagaaacacaaactaaacaaagacacagtgaaactaacagaagttattaaccaaatggttctaacagatatttatagaacatttcaccctaaagcaaaagaatatatgttcctctcagcacctcacagtaccttctccaaaactgaccatataattggtcacaaaacaggcctcaacaaatacaagaagactgaaataatcccatgcaacctatcagatcaccatggactaaggctggtcttaacaacaaaaacaacagaaagcacacatacactcataagctgaacaacattctacttaataataacttggttaaggaagaaataaagaaagaaattaaaggcttttagagtttaatgaaaaaatgaagacacatcataccaaagtttacgggacacaatgaaagcagtagtaacagaaaaactcatagctctgagtgcctccaaacagaaactagagagagcatacactagcagcttgacagcacacctagaagctctagaacaaaaagaagcaaatatactcaagaagagtagatggcaagaaagaacaaataggaaaacacagaactatacaaagaatcaacaagatagataaatccttagccagactaaccagagggcccagagacagtatacaaattaataaaatcaggtggcgcacgcctttaatcccagcacttgggaggcagaggcaggtggatctctgagttcgaggccagcctggtctacaaagtgagttcaaggacagccagggctatacagagaaaccctgtctcaaaaaaccaaaaccaaaacaaaacaaaaaaaagggagacataacaatgaaatatatcttaaaataactattctatttgttgaatatcaacaggtgaaaatattaaaatcatgttctgcaaacatcatggacattttattgataatctgtctcactgtgcttgaaattagcattttctttttttgtgtgtgtgtgtcaaaattcttttattttttttccaatgctataccaaaagtcccccatacccacccacccccactcccctacccacccactccccctttttggccatggtgttcccctgtactggggcatataaagtttgcgtgtccaatgggcctctctttacagtgatggccgactaggccatcttttgatatatatgcagctagagtcaagagctccggggtactggttagttcataatgttgttccacctatagggttgcagatccctttagctccttgggttctttctctagctcctccattgggagccctgtgatccatccattagctgactgtgatcatccacttctgtgtttgctaggccccggcatagtctcacaagagacagctacatctgggtcctttcgataaaatcttgctagtatatgcaatggtgtcagcgtttggatgctgattatggggtggatccctggatatggcagcctctacatggtccatcctttcatctcagctccaaactttgtctttgtaactccttccatgggtgttttgttcccaattataaggaggggcatagagtccacacttcagtcttcattcttcttgagtttcatgtgtttagcaaattgtatcttatattcttgggtatcctaggtttggggctaatatccacttatcagtgagtacatattgtgtgagttcctttgtgaatgtgttacctcactcagggatgatgccctccaggtccatccatttggctaggaatttcataaattcattctttttaatagctgagtagtactccattgtgtagatgtaccacattttctgtatccattcctctgttgaggggcatctgggttctttccagcttctggctattataaataaggctgctatgaacagagtgtagcatgtgtccttcttaccagttgggccatcttctggatatatgcccaggagaggtattgctggatcctccggtagtactatgtccaattttctgaggaaccgccagacagatttccagagtggttgtacaagcctgcaatcccaccaacaatggaggagtgttcctctttctccacatcctcgccagcatctactgtcacctgaatttttgatcttagccattctgactggtgtgaggtggaatctcagggttgttttgatttgcatttccctgatgattaaggatgttgaacattttttcaggtgcttctctgccattcagcattcctcaggtgagaattctttgttcagttctgagccccattttttaatggggttatttgattttctgaagtccaccttcttgagttctttatatatgttggatattagtcccctatctgatttaggataggtaaagatcctttcccaatctgttggtggtctttttgtcttattgacggtgtcttttgccttacagaaactttggagtttcattaggtcccatttgtcaattctcgatcttacagcacaagccattgctgttctgtccaggaatttttcccctgttcccatatcttcaaggcttttccccactttctcctctataagtttcagtgtctctggttttatgtgaagttccttgatccacttagatttgaccttagtacaaggagataagtatggatcattcgcattcttctacatgataacaaccagttgtgccagcaccaattgttgaaaatgctgtctttcttccactggatggttttagctcccttgtcgaagatcaagtgaccatagttgtgtgggttcatttctaggtcttcaattctattccattggtctacttgtctgtctctataccagtaccatgcagtttttatcacaattgctctgtagtaaagctttaggtcaggcatggtgattccaccagaagttcttttatccttgagaagactttttgctatcctaggtttttttgttattccagatgaattcgcaaattgctccttctaattcgttgaagaattgagttggaattttgatggggattgcattgaatctgtagattgcttttggcaagatagccatttttacaatgttgatcctgccaatgcatgaacatgggagatctttccatcttctgagatcttctttaatttctttcttcagagatttgaagtttttatcatacagatctttcacttccttagttagagtcacgccaagatattttatattatttgtgactattgagaagggtgttgtttccctaatttctttctcagcctgtttattctttgtatagagaaaggccattgacttgtttgagttaattttatatccagctacttcaccgaagctgtttatcaggtttaggagttctctgttggaatttttagggtcacttatatatactatcatatcatctgcaaaaagtgatattttgacttcctcttttccaatttgtatccccttgatctccttttgttgtcgaattgctctggctaatacttcaagtactatgttgaaaaggtagggagaaagtgggcagccttgtctagtccctgattttagtgggattgcttccagcttctctccatttactttgatgttggctactggtttgctgtagattgcttttatcatgtttaggtatgggccttgagttcctgatctttccaaaatttttatcatgaatgggtgttggatcttgtcaaatgctttttctgcatctaacgagatgatcatgtggtttttgtctttgagtttgtttatataatggattacattgatggattttcgtatattaaaccatccctgcatccctggaataaaacctacttggtcaggatggatgattgctttaatgtgttcttggattcggttagcgagaattttattgaggatttctgcatcgatattcataagggaaattggtctgaagttctctatctttgttgggtctttctgtggtttaggtatcagagtaatagtggcttcataaaatgagttgggtagagtactttctacttctattttgtgaaatagtttgtgcagaactggaattagatcttctttgaaggtctgatagaactctgcactaaacccgtctggtcctgggcttttttttggctgggagactattaataactgcttctatttctttaggtgatatgggactgtttagatggtcaacttgatcctgattcaactttggtacctggtatctgtccagaaatgtgtccatttcgtccaggttttccagttttgttgagtatagccttttgtagaaggatctgatggtgttttggatttcttcaggatctattgttatgtctcccttttcatttctgattttgttaattaggattttgtccctgtgccctttagtgagtctagctaagggttaatctatcttgttgattttctcaaagaaccaactccctcgtttggttaattcctttgaatagttcttcttgtttccacttggttgatttcacccctgagtttgattatttcctgccgtctactcctcttgggtgaatttgcttcctttttttctagagcttttagatgtcttgtcaagctgctagtatgtgctctctcccgtttcttcttggaggcactcagagctatgagtttccctcttagaaatgctttcattgtgtcccataggtttgggtactttgtggcttcattttcattaaactctaaaaagtctttaatttctttctttattccttccttgaccaaggtatcattgagaagagtgttattcagtttccacgtgaatgttggctttccattatttatgttgttattgaagatcagtcttagtccatggtggtctgataggatacatgggacaatttcaatatttttgtatctgttgaggcctgttttgtgaccaattatatggtcaattttggagaaggtaccatgaggtgctgagaagaaggtatatccttttgttttaggataaaatgttctgtagatgtctgtcaggtccatttgtttcataacttctgttagtttcactgtgtccctgtttagtttctgtttccatgatctgtccattgatgaaagtggtgtatttaagtctcccactattattgtgtgaggtgcaatgtgtgctttgagctttactaaagtgtctttaatgaatgtggctgcccttgcatttggagcgtagatattcagaattgagagttcctcttggaggattttacctttgacgagtatgaagtgtccctccttgtcttttttgataactttgggttggaagtcgattttatccgatattagaatggctactccagcttgtttcttcagaccatttgcttggaaaattgttttccagcctttcactctgaggtagtgtctgtcttttcccctgagatgggtttcctgtaagcagcagaatgttgggtcctgtttgtgtagccagtctgttagtctatgtctttttattggggaattgagtccattgatattaagatatattaaggaaaagtaattgttgcttccttttatttttgttgttagagttggcattctgttcttgtggctgtcttctttttggtttgttgagtgattactttcttgcttgttctagggcgtgatttctgtccttgtattgcttcttttctgttattatcctttgaagggctggattcctggaaagatattgtgtgaatttggttttgtcgtggaatactttggtttctccatctatggtaattgagagtttggctgagtatagtagcctgggctggcatttgtgttctcttagtgtctgtataacatctgtccaggctcttctggctttcatagtctctggtgaaaagtctggtgtaattctgataggccttcctttatatgttacttgacctttctcccttactgcttttaatattctatctttatttagtgcattgaaattagcattttcttaatgtttaacttcaaagagtttttgctattttgaaagttttaaaatatatttactgataaaataatttctctccaaaaaatacaaaaaacaaaaaacaagtatatcatgttctgacagctgtgttggttttctggactaaagtcatcagaaaaatcaagatttggaaataccattagacttgaagatacagaggaattgctatacccaagctacctcagctatggtgccctggaggtcgctggcatacattagcatataccctcaccagagacatggcatgctcttctgctttatggtccaagcaactggagtttcaaaatataaagattccatataaaaacataatgtcttatataaatgcacattccagcttccctaaaactacccaagaaaggtccagctagggggacatgttgatgttctaaggcacagtgactggcaccacgtcaaaatgacaagtgccatcaggaaacctctgaagtttgtttctgggtattaagaaggctaaactggatggccaactgaatatcaggcattttaaaaaattataaaagcaggaatggtggcctgtgcctgtaatcccagcaatagtgaggttaaaaaccagagaatcggttgcttgaggtcaggcatggctaaataataagtttaataccacgctgtcacaggagacccctgcctcaaaaaataaaaataaaaataaaaataaaggaaaggggaaaataaatgggagaataaaacaattccagatagaaagggaagcctagacaagatagacaagtgggataagtgctgatttcctatcctgacttttttcaattgtaacataaaattattactcacaaaatcctttcagaaatatattgttactcccccatcttttcctctcaattgtatgtgtgtgtgttttcattttatcttttaatttgttgttatgaattgcttctagaattaaatacacaagtctaaatgtgaggtaggaagagacatgacaagcatagaaactcatatttgtttaaacaatgcctagactttggggttagacaagaatacctgggagcgagcactgagtcgcttgaggagaaggcctgaaccaagtcttaagaaagaccaaccttctacagttaaatggggagaggagaaagaagcctgagacagagacagatgcagaaacagacgagtgagcccagcgagaggccagggcaactcaggtgccactcaaaccgcattaaatccaggaccacaggtattcttcaaaacacaagagcttaaatttctgtgccatggaacagaagaaccaccagcagcccacacagtgacacatatacagggactcaactttggagaagtcctggtcccattcagatgacctactatgcatgtagttttccagtacgtgagttcttccacggagatgggggcagttggaactggtcagtgttcacgtcccggaggttagcacgagccacgagcacatgctgttctgaggtgtcaggttgatttcaggttcccagaagcttaggggagtaaggatttattttctggaccaatcttatagaaattccctgatgagaatctgccattctcttcccgtctttaataatggtctctcagcacacagaggattcagcagatgaagtgcttcctagccatttgtatttgctttctccgcgtgaaggcaggcacagtcaccagcccagggtgggcagagtcaaattaaggaaatgaatatttcagagtagaaagaacaggggactcggaatgcgcctgaagctggcagatacgcatatggagaaggaagtcttggagctgtggtgtttctcctggagagatcaccagcagacagacagacagacagacagacagacaggatcttcaacattggagaaatttaacagagttaaatattaattacattaacaggaataaaatgagaaacacaaaaacgtctgccaagtcgccaaatattgttaaagtactaacatttgactagcaatttttcaagacagaacacattaaaaacaattggactttttgttgtcattttttacccagggaactggtgagcacggagctagtggccccaaaggagaaaaggtaatcctgtgttgttgttgttgttgttgttgttgttgatgatgatgatgatgatgatgatgatcaaagggattaagcactttcacctataggggcagcagtcccagtgagcaggaactttacctgcctgctgaccagcagctggatgctgccccttgggggcgctactgagcagaggcgggctacaagagaagggatgtgtcaagagaaacatccttaataatgatccagaaaggagaaagatttatacgatttgaaggaaaaccatagtacaaaggaagggtcaggatcccacaagaaaacccacagaaggaactaacccgggctcataaggactcacagagactgaaccaccaatcagagagcttgcctgggcctgacctaggcctattgcacctacgttacagttgtgtagtgtgggtttcttgtggaactcctaacaatgggagcacaagctgtgtctctgatgcctgcctttgggaccctgtcggcctgctgggttgtcctgtccagctttaaaaggagagcaggtgcctagtcttacttcaatttgatatgctgaggttggttgatatccacaggaggtcacagatactgagggggagtgaatgggagtgggggaacagagaactgcagccaggctgttaaaaatttttaattaggaaggaaggaaggaaggaaggaaggaaggaaggaaggaaggaaggaaggaagtcagaaatccttgcaggtagcaaaaaccataggaagaaagagccaatcggcaaaatgcttgtgggtcaagctcactagttaactgttcttaaagcaaaggaggctgtcgtgggagtacttcgttttgttttggtgaggttttaccatgcacagtagtagtctagccaagcagttatttcaaaacgagttttcaagataaaacaccaatatacttctgttacattttccttgtcctcggttggaagtcctgctttattagctataaaagaatggcaggttaacttctctatagaaaataccactttattctagttggattgtaaaaccgtgatgaccttggactgtgaatgtggcacggtcagaggaaaaatttaaaagtaaagaaaaatgcacattaaatctacagacaaggatatgaaggtctggaaatacttttaaaaggcagatggcctgtgagagctaccttccttctttcacccagtaaaagttctcttgattgagggcatgatacttttcgacacaagtgcaagaaatatgacttctgtgctttataaatcagcacagccaacctattcaaaagattgtgtatctctcaccaggaaaaatcgctaaaagatcatctcagcaggaacagtgagttccttatagactagtcattcaagaagaaaattctctgggatacataaataaaaccccgacattctgaaaaaaaacaatttaaaaatgattctttagcaatccaagtcactcccgggtcttggattttgaacaaagctatttcctctgaagcagcaccttatagaatcatatcccaacctcacaaatggattgcattttaagtatttgctatttgacatatgcagactcgggacgcagggacactaagcttgtcacacaggacagctgagtggagaaggtgggggtgtgatactcttaaagcatttaaatgatgagtcacttcttggaacaaaacagctggcttctgtgttgccctcttcattagcaaacatatgtcatttagaaatgcttaagaccttgctgatgagaaatttgatgctgtaaaacaggtgtatctcaaactccagggaccattcttactgcttggaatctttttaattgcttcagaatgttaagtggagttagaaaaaaaaaaaaaccgagagactatctgttccatcttcctacccacataaatgatttgtctagaagagtctgtagggaacttgatgctgtgagtgctatgtacctatgaaagcatttttacaaattatcattaatgaaggaacagctctgccagtaagccatgtatcgagtcacagaaagcctgagtgtagcaactgcttgaagaaagtccacgcatctacttcctgtctgttctcgatcaatctcctggctttttagacctgtgtctttcacagttggtggatctctgcttatgcttgtgatatgatcaggggttccaaaccctgcctgtacacaaaagcaccaggacagggcactggaaagcctgttcctgagccccatgcgcaggggctccgaggagagggaaaccagtatctgtctcttaaatacatggacatttggttgaggctgggagccactgtgggcttgaatgagcattagctttgggatcacaagctggctatggtataaactgtgccgttaccttggaagccatctccttaccctaagtatcaggttcccaggatgtaaagcagacataatcatctacaggaagaatgatgggaggattaaaggctaacgagatgaattttcctggaagcccaatgctcagtgcaaattagactgtcaataaacactggtttttcttatttgctctccaccttctgctcgggagcgctcatttagctctttccgaatgagccatttccatccttcctgcctagcctggttcttctttgccttcctcccaataattctgaagggaggagactcgagttggaaagtagaaaaaaagatttaactaacaatattctttaaatccttcattttgaatagatgcgtatttataggtaatttctagccccttcacttgctttctgtttctgctatattagatgagtattcttgttagggctattattccttaatgtctgtatagtgggatcatatcacaaacctgacaaatgacatgaaactcactttagagttttacaaaccaactatgcatgggtgcctaaagtggtcactgtcttctctaccttccaacgttttacagaatttactatcttaaaaaaaaaaaaaaaaaaaaaaaaaacaccagcttcaatgtactaaagtacagatagagatatacaaagatgtattttgctcggatcaaaccatatgccagggctctcagaagatggttcagaagctaagagcacttattctccttactaaggatttggggttagtttccagcacccataagaagcagctcataactgcctgtaactctaactccaaagcatatcacatcctcttctggcttttttgggtacctgcacatgtggcactcatacagacaagcaggtgtgcacacacaaagtaaaaaaatatttaaggaaatatagctagcacactttaaatttcatgtccattacctcaaagaacttattagttcttaagcttaaaattcaaagggacccagagaaaaggctaggaattaagaaagatatatacctgtagatacaacagaaagatatatacctgtagatacaacattaagtattgttttacaaaattcacctcgggctggaagaaaaatgttcagaactacctgtggtctagtttaacttaagtctagtttacctgtttaacttaagaatcaagtgactgtcactctggaagtcagtctggaggttcctcagatttggacataatactaccggaagatccagcaatatcactcctgggcatatacccagaagaagttctaactggtaataagaacatatgctccactatgttcatagcagccttatttataatagccagaagctggaaagaacccagatgtccctcaacagaagaatggatacagaaaatgtggtacatttttacacaatggcgtactactcagctattaaaaacaatggatttatgagattcttggacaaatggatgtatctggaggataccatccttagtgaggtaacccaatcacaaaagaagtcattagatatgcactcactgataagtgaatattagcccagagacaaagaacacccaagatacaatttgcaaaacacaagaaaatcaagaagagggaagaccaacgtgtgggtacttcattcctccttagaatagggaacaaaatacccatggaaggggttacagagacaaagtttggaactaagatgaaaggatggactatccagagactaccccacccggggatccatcccataatcagccaccaaacccagacactattgcatatgccaaaaagattttgctgaagggaccctgttatagctgtcacctgtgaggctttgccagtgcctggcaaatacagaagtggatgctcacagtcatctataagatggaacacagggcccccaatggagaagctaaagaaagcacccaaggagctgaagggatctgcaaccctataggtggaacaacaatatgaactacccagtacccccagagcttatatctctagctgcatatgtagcagaaggtggcctagtcagctatcactgggaagagaggccccttggtattgcaaactttatatgccccagcacaggggaacgccagggccaagaagtgggagtgggtgggtaggggagcagggtggaggggaaggtatagggaactttcaggatagcatttgaaatgtatatttaaaaatatctaataagaaagaaagaaagaaagaaagaaagaaagaaagaaagaaagaaagaaagaaagaaagaaagaaagaaagaaagaaagaaagaaagaaagagaaaggaaggaaggaaggaaggaaggaaggaaggaaggaaggaaggaaggaaggaaggaaggaaggaaggaagaaagaatcaagtggttgttgggaatgctgataaatactttaaaaaaataaatccagtgcttcagctctgatgtctggtcacgatgtcactcctgcctacaagaaagccctctccaactgtattttctgaaaatgcctttctatgtcacatacaaatccctcttcaacgttttgaccagcacatcttagacatttccaaactgctgctgtcaccaagtcagcaagaatgtcatctttgtctacagccttcatctacgcctcaagagaaacactgcagacagctggcagattcatttctctctctataatcactgactacacacacacacacacacacacctaaaataagaaagaagtcctcagaagagaacaagagcagactgtcgtgtcatttaaaggcaaaaataaagaaataatgattttgggtccaccagaacaaaactataattcttttctcctctgtgtgtcctgtccttgaaaagtgattaacattgttccacattaattttaaatgtcctaatgaaatgttatgggtttctagaaggcctcaggcatggaggagagcaaagacaccttattaggaagacagcctggctagattcagatcttcacgaggccctgaccccggtgggattctgtaggataagggacatttctctacacttcagcacttctgcttttccttggcagggcgatactgggctgcctggatttccagggtctgttggccctaaaggacacaaaggagaacctgtaagtattttagctttagggaagaggaagaaataaaaaaataaatgaaaaattaaaaatattttcccaaactaaccccaacttcatggtgttttaaatctaaaactgtaaacagcattgaaatggcaagtacacaccatgccaggcaccagaccctctctatcttaattcacttaactcatataaaaagtccccatgaggtggcccattccgtacacaggtttggctggttccagattccgggctctaaaatgattaagttgcctggatatgactaaataccagatctaaaatgaaaaacacaatcaatatatcaagactggtacaaatttatctttaaaattgaaaatgcttcaatctctctctctctctctctctctctctctctctctctctctcctcaaacaactgttctcagtacatctctgaaattattttcctctctgttttctgtgagatcgaagtgagatcacaagctaacttccaatattgctgtggctggtttcttggaaaacttctctttgggaggaaaggaaaaaaaaaagaaaaacaaacaaaaacccttccacatcatttatattcaaatagaactgctgaagagtttgcaaacgtgtggtgtgtgtgtgtgtgtgtgtgtgtgtgtgtgtggtgtgtggtgtgtgtggtgtgtggtgtgtgtggtgtgtgtgtgtgtggtgtgtgtgtgtgtggtgtgtgtgtgtgtggtgtgtggtgtgtgtggtgtgtggtgtgtgtgtggtgtgtgtgtgtgtgtgtgtgtgtgtgtggtgtgtgtgtggtgtgtgtgtgtgtgtgtgtgtgtggtgtgtgtgtgtgtgtggtgtgtggtgtgtgtggtgtgtggtgtgtgtggtgtgtgtgtgtgtgtgtggtgtgtgtgtgtggtgtgtgtgtgnnnnnnnnnnnnnnnnnnnnnnnnnnnnnnnnnnnnnnnnnnnnnnnnnnnnnnnnnnnnnnnnnnnnnnnnnnnnnnnnnnnnnnnnnnnnnnnnnnnnnnnnnnnnnnnnnnnnnnnnnnnnnnnnnnnnnnnnnnnnnnnnnnnnnnnnnnnnnnnnnnnnnnnnnnnnnnnnnnnnnnnnnnnnnnnnnnnnnnnnnnnnnnnnnnnnnnnnnnnnnnnnnnnnnnnnnnnnnnnnnnnnnnnnnnnnnnnnnnnnnnnnnnnnnnnnnnnnnnnnnnnnnnnnnnnnnnnnnnnnnnnnnnnnnnnnnnnnnnnnnnnnnnnnnnnnnnnnnnnnnnnnnnnnnnnnnnnnnnnnnnnnnnnnnnnnnnnnnnnnnnnnnnnnnnnnnnnnnnnnnnnnnnnnnnnnnnnnnnnnnnnnnnnnnnnnnnnnnnnnnnnnnnnnnnnnnnnnnnnnnnnnnnnnnnnnnnnnnnnnnnnnnnnnnnnnnnnnnnnnnnnnnnnnnnnnnnnnnnnnnnnnnnnnnnnnnnnnnnnnnnnnnnnnnnnnnnnnnnnnnnnnnnnnnnnnnnnnnnnnnnnnnnnnnnnnnnnnnnnnnnnnnnnnnnnnnnnnnnnnnnnnnnnnnnnnnnnnnnnnnnnnnnnnnnnnnnnnnnnnnnnnnnnnnnnnnnnnnnnnnnnnnnnnnnnnnnnnnnnnnnnnnnnnnnnnnnnnnnnnnnnnnnnnnnnnnnnnnnnnnnnnnnnnnnnnnnnnnnnnnnnnnnnnnnnnnnnnnnnnnnnnnnnnnnnnnnnnnnnnnnnnnnnnnnnnnnnnnnnnnnnnnnnnnnnnnnnnnnnnnnnnnnnnnnnnnnnnnnnnnnnnnnnnnnnnnnnnnnnnnnnnnnnnnnnnnnnnnnnnnnnnnnnnnnnnnnnnnnnnnnnnnnnnnnnnnnnnnnnnnnnnnnnnnnnnnnnnnnnnnnnnnnnnnnnnnnnnnnnnnnnnnnnnnnnnnnnnnnnnnnnnnnnnnnnnnnnnnnnnnnnnnnnnnnnnnnnnnnnnnnnnnnnnnnnnnnnnnnnnnnnnnnnnnnnnnnnnnnnnnnnnnnnnnnnnnnnnnnnnnnnnnnnnnnnnnnnnnnnnnnnnnnnnnnnnnnnnnnnnnnnnnnnnnnnnnnnnnnnnnnnnnnnnnnnnnnnnnnnnnnnnnnnnnnnnnnnnnnnnnnnnnnnnnnnnnnnnnnnnnnnnnnnnnnnnnnnnnnnnnnnnnnnnnnnnnnnnnnnnnnnnnnnnnnnnnnnnnnnnnnnnnnnnnnnnnnnnnnnnnnnnnnnnnnnnnnnnnnnnnnnnnnnnnnnnnnnnnnnnnnnnnnnnnnnnnnnnnnnnnnnnnnnnnnnnnnnnnnnnnnnnnnnnnnnnnnnnnnnnnnnnnnnnnnnnnnnnnnnnnnnnnnnnnnnnnnnnncttgaacctggagctcaacaattctgcaagcctatctagtcagcaaccaataggaatcctgctgtctctacctccctagccctgggatggcaaacaagcattgccctgccctgctttgacgtaagttctgtgaatgaaactcattcttcatccttaagcaaaaaaacaaaaaaacaaaaaaaccaaccaaccaaccaaccaaccaaaaaaccagaattagcatgtgtctagccatttttatgaaatgcagcacaccttttaaaattgctttcacctgtattccagagtgagttggggatatgggtttactggggatgagggatggagaggtcagtaaaatgctgtagtggcaaacaggaaagcaacaggaaaaacattccgtgctaccaagctgaactccactgctgcttcggcttcacttagaccccttctttgatagtgatcgtctctgtcagctttaaaatctccagcacgcccatggacaccataattgaccgtctggtccctttatcctcagtgtctggtccaggcctaccgaagagcctttactagtgtcgtccagctgaggatttcaaagggtctgggaactattctgggcttcttcctgctgctcacccgctcccatgagccactcacaccatgtcctaacccctcctcggggtctccactctctcctagcccaatgatacccacctcgattttaactttgcaccatgggagatgtgacaagtaggacacagagcagaaaaggactttcttccactcctgctgtactctaaacaagcgtgcagcctcgaagccgagagttctaactcgagttccgggtggcgcctagaagcctgtgtttcccacatgtgacattggtgttgctctagcatcactgcgggttggagtagtacatcctttctaggcacgagagacctttctctctttaacgcattccctctggctttcgttcatgccttcagtgttcgtggggagcctggctacccatttgggccaatctgagccttggcctttttattcagcagaaataacttcttgggctggagggatgggtcagtggttcaaagcactggctgctcttccaaaggacccaggttcaattcccagcacccagacagtggtttaaaaccatctgtaactccagctctaggggatctgatgtcatatcatgatcaccatgggccccacacacacatgtggtgcagacacacatacaggcaaaaaccacaattcccaaaatttaatagataagggaaagtggaactctaaaacctaaaatggctaccccaggtagtcctcaggaaagatgagattaaatagcaagcctgtgcttaaccggcatcctacaactcgacgtaggtttttgaggcagacctgttattccgagctaatctagggatccggctgcaggagcacaagtttgaatagcttcggatacagactgagttcaggtccaaacttggcaacttaattaaatcttatctcaaagctaaaagacaaaatgtgaggcctgacatacagctctatgttaaagcattgccctgtattaattcccaaggagcaggaattgaacgttgatttcgggcacaccgtgactctttcaagaccgctaagacataagagcaagcagaggcagaagcaacgcagcccactgcgagtgcctcaaatcttaacagttagtcatgtgcagaatcctagaacaaaaatctgaaaagataaggccctggtctaacatgtaaaaatacatccataataaaagatgagattctgttaggtagataacagcttgtacactcgcaccgagtaacagatatgtggctgagcccaggtaagttagccctcactcacactataggggaagcgcagttcactaggaagaggtgggtgttcaaatccctacacactcagtcaccaagctgatttggatcacatagctttatccttgggtacacacaacctctgtcaccactgaaaaggaagtgagactgaagaatagtgagggaggcctctcactgtctctcacttgccagcaactcctgtcatctctaattacaggtcactgctagagttaggtactcgatcgagtaaaattacaaaacagctagagaatgtatgagaaggtgaccctacatgcctagcatatagaacatgagaatctcaaagacaggctttcaataaacactccctactcccacccccaaatgaggtatccaagaaaatagcagtcccatgatgattcttacatttctcttgatttccatacatgaaagaactctttaaagtgcatagtttccttcttattggccattcactcaattcaaataataaataaatctgattttaaaatcaaagcaggcagatagaaacaaagaaaaccttaaaatcaggctgcccaagttttatataaaacattctacttttctgtgcctcagtttcctcaaatgtatgtggctatactaagagcaaattcccactgacacctgaggctaactacagtgtgtgtgcctgtctgtgcatgtgtctgtgtgtacatgtttctgtgtggacatgcatgtgcacgtgggtgtgcattgtgcatgtgtgcatttgtgaatgtgtgtgtgtgtgtgtgtgcatgtgtgtgtgtctgtgtgtgcatgtgtgcatgtgtttgtgtaagacgtgaaggttgctaacatagtgactgacatcaaggagagtactggtcagcagagcttatacctcaaatctatctttccagtgaaccccaactccaagagcaaccaacacagttccagtgctgtttatccagtaactaacccctttgtgtcattttgattagtatacaatggacactttaatgagcatccttaaaataatgcttttgtgtgttcaccgaggtgggaaactcgagtgcattcctgccatttgagggctacccccacccatttccctccactttccgatgagtgtatccatcttcatttcacaatcagaagttttagccctgggcagcatttcaatttgactgctgttgggagcctcagcataggtttaaaatgcttagctccatgctcatttgggaccatgaaggaatctgtaaattaattctcacttgcccctgtctgagttgatttctaagtgtttataattgattctgttttctgcccatttttctagggggagcctttaacaaaaggtgaaaagggagatagagtaagtaggtgtttatcactgtcttgggttttctattttattgatttctctctccattttgttgtctggcgcctaatacctttgataaagtaagttttctgaaaattgtactttcttctgttttttttttaactcttatttttaatccttgataagtgctaccatgtgataacatttgaacatctgatttgggttttactggctttcttttgtacttgtatttgcattttacatttgttggggggtagccgtatgtgtatgccacattgagtacttgccttgatatgtctgtgatggtcagaggacaatttgtgggagcctgttctctccttctgccttgtgggccctgaggattcaattcaggtcttcaggatcagcaacaatggcttttactctcttgagtcatcttgccagctctattctggttttctttagcctatgttattcctgagattgcatggggtggggtgaggattccacttttttggtccaaatttgaagcaagcgttattaaatattaaatactaaccaagagatgaactttgatcataatcactccctggaattttgcagctgagtggctcctgggttttcatggacagaactcataggctaccatgccttcccatgaggctttgctattttccaagaattacaactcccagtattctaggaagttacgtggtccttgggcaggtggggcttacaggctaattttgggtactacacctactgctattagtgactagacttcaatgtcataaaagtcatcaagtaagaatatgcaaactaagcactcctttaatcccagcactcaggattaaaggatttctgagttcgaggccaacctggtctacagagtgagttccaggaaagccagggctacacagagtaaccctgtctcaaaaaaccaaaccaaaaaaaaaaaaaaaaaaggaaggaagaagaaagaaagaaaaaaaggaaaggaaaggaaaggaaaggaaaggaaaggaaaggaaaggaaaggaaagaaaagaaaagaaaagaaaagaaaagaaaagaaaagaaaagaaaagaaaagaaaagaaaagaaaagaaaggaaaggaaaggaaaagaagaggaaaggaaaggaaaggaaaggaaaggaaaggaaaggaaaggaaaggaaaggaaaggaaaggaaaggaaaggaaagtctatgcaaactgtaaaacaggcaatgcagactttcagaaaaattgttaaagacacaaattggattttcaagtaagccatggaaaataagaaaatatcttttactaagcacctgggaatagaatcaccagtgcacatctctttattcttctttattctattataatagacatattataatatattgtagaaatatacatgtattatacaatatattttatgtatatgcatatgtgtatatgcatatattatatgcatacatatacatatataaaatgcatattatatatgcatatatgcatatgtatgtgtatattataggtgtgttatataacatatactgcataatgtatatgttataaaagatataatgaatatttatattaagttttatgaaaattatatatatatatcagcctattctatcctgactcatatctgaggttggtgatcagctggtggtgaatgagtcattgctgatgtgtcatgatatcacatgaagaaataaactgaggtgctctgtcacttattagcaataaggattctgaatgttttagggtgagcattgtttgattgcatggtttccataatgtacccctttgttatgtgttaactgatagaaagtcaattaaagtatcaagatgtcccactccatctggactcaggttgaaccatatggtgattgttttatttacagggagaacccggcctattaggaccacagggaataaaggtagtctggcatttttttttctcagtcacagttgctaccttaacgagatggtaaaaataatagtaatatttaactttcctttccactcatgcacttagggggaacctggagatcctggtccccctggtttactaggaagcccagggctaaaggtatgtacttcataaataaatgtgtgtcggaaatcactatttggaaataattcaagaattacagccatcccgcattcaagaaggttttggtgtgccactcattttcatcaagatgatctgggagactttattttgtttccatggtgaccccaccccactggctacaattattacaaacataaacactaggccttttgggatacaatgggatttttaaatcctttttcagagcaaattcacaacagcatccataaaagctttaaaagtacacaatgtcagttaaatctacagccctgtgccacattcctaacaggaagaggatttgagatctatttcctcactgaaattatgcatccctgtgatatctgactttcccaggggaaattctacaggagtgtctcaagataaagcagttaggggactgtgagagagacttgagtggaatgatcccagccagtttaggttaccccatcatcacctgatgctaaaacagacccattaatgaaacatctcagaactatattactaagctttgagcacatgtcagcataatacatagaaagtgagatgctgaaagtctatctctttctaataaaagtcttgttatatctcaccaatattcagatatgatctagttttatgaaaacttaaagtatataccatcttctattttagggtcagcaaggacctgcaggttccatggggcccagaggaccaccaggagatgttgtatgtattgtatcatcactattttgaaataaaattgatgtcagttaatgagctgattatgctacattccccaaaaccataggttaaccccactactcaaattggtcacttctaatgccaggggattaagtggatctgaataaaccaatctttgaaattcaagataactcaattgtcagtagtcaatgctacagcagaatggagaaaaatagaaatatccaaagaaataagagaaaaccaaaagagacagcaagtgtttccaaattacattcatagactcgagttcaaataatcattttcatgctatatgataagctcaatatagcttgctccctctccctctccctctccctctccctctccctctcttcccatatttctacccttgggtaatctcctagtctccccatgggaactgagagctaatcatcaaataatagatcaaaatggagatctggctacaacactcagtgactctgtgcccatgactaggatgctagttggccagacttgagacctggcctcttttcaccatcttgggagtggccctatgacttctttccttgctctcaagcttactgcctgagcctcctggaggcaactggttggccttcatagtgggcttgctaatctgaacatctgatccataagaaatgttatttatccctcctagtcttagctagggttttactgctgtgaacagacaccaagatgacagcataatgcttatattgggacacttcattggggctggcttacagtgtcagaagttcagtccattatcatcacggcaggaagtatggcagcattcaggcagacatggtgctaaagcaggagcagaaagttctgcatcttgatccaactacagacaggaaaggattgtctgtcttctaggcagctaggaggagggtctcaaagcccatgcccaaagtgacacacttcctccaacaaggctccccctcctaatagtaccactccctgggccaagcatattcaaactaccatactcctacaaggcattattgaatcacttcaggaataccttgtggaaagacaccataaaaaaaaatgttaataacacaagaggaaacattaaatactctgcttagacagaactgttggtactgaggaaataaaatgagaattaaaatcaaaaggaaaaaagcccctgtgcaaaagcataataaaaatattttgacatttttagttgggatgtagtgcttgctcccagcccctaccatcccacttccttcttagaaactatataggtgaaacatttcaattactcttttctgtttcccattatggctgttgactgcacagacaggaagccacacatatctccaaatagcgcttcccctaaggctaaacatcaacattaccttgtatatagacgtttaaattcagttctctgacaaagatgcatggctattacactaagagatgttctaactgctagttttctttcttcttgtattttctagggattgccaggagaacatggtattccaggaaaacaaggcgttaagggagaaaaggtagagtttcgattttacatttgtatattatttaagtagatagaaagaaaagatcctaatgccgtggaagaagcacaagatttcaaggcttgagcctcacatcagtacagggacagatgttcatacaaactgtgtccgggtgtccctggtgccatatatcattgccatgatggagcacagaaacttcagatgagaaaatgagccaacctggaagtggagatcttagggctgcggtcaagctgtagaatctcagaagcctcttagtcttttactacctgcttcttgatgtgtcctatgcatattaatactgcattcctctcagggaataataaggtgtttcgatcatctaaaaacgcttcatgaatagacactctctttgttcctgtgtttacacacaagtcggtgttttctagtactgctaaaccttgtgtagcagaactcatgtcagagctcgaatgtgtctaagatggtaagtagagtgcccggactgagctaggcacttggtaaatgcactagaggggctgaatttagaacggaacataggatgaactttgattggctgtgacaacataaagcaatggaaaccactgtctcccaacctcccactatgaacttcagcagaaaaagaaagaatcgtctcttgttttccacagggagatccgggtggaaggctaggccctcctggacttccaggtctgaagggtgatgctgggcctccagggataagcctgccagggaaaccagtaagtactaccctatgactaggggtgtccctgagcgctcattcactgctaattctgagcccccagttttaagacacaagtgtgatttttttttaaagcctaccccaaagaaaatttatcctataccctagcacagaaagataagacattttgaatgtttcgcagatgataagcaagcacacaacactttccatgtcatcggagatgtttgaaaggtgtcaagactttaggtgctgatttctgagtgattgaaagaacaactgctccacaccaccttcccagaggtttaggctacaaccacagaccatcactcatagaaagtgtgtgtgatccacattcttctcaggacactggaaactgtatcacctgaaaacccaaaaggcaatatactcatttgatttgcccattttctcaaccctctttctcctattacatcaacaactaatggtgatcattctgaagattagatatttaatttcatagataaaacctcttatattttaagctaattattcaaaatctataaccttgtaaaatagtccctctgtatttaataagagtcttactcaagaaaaatgaaggctagtgagtaaatcacggttttgaattatgacttctaattttttaattatttagaaaaagaaatgtagtcatcttgctttttttttttttccttttaggggttagatggaaatccaggatcacctggtccacgtgggccaaaggtatacgaatttcatagctaattttagaagaattaatagttaagaaaaacagaactagaaatgtcttgtgcctcaaattaattagagtctttggttttcacagggtgaaagaggtctgcctgggctccacggttcccccggggacacaggcccaccaggtgtaggaatccctggtagaacagtaagtaatattcagatgtttattgaaacccattggttgtgttgttatgtgtctactcttatttagtgcagtcctcaaaatcttacacaaagcagtaagtcgaggaaaagaaatagaagagtttcaaatagaaaaggagggattcaaaccatacctgtttagacacaactcaatctttatgcttaaaagaccctgaaacattgctagaaaaattttagagctgaaaaattttcagtaacaaagcagaacacagaataagcattaaatgtagcagcatctctacatactattaaaaaacttgacaagaaagatcaagaggagagaaccttactcaataagtgctggtgtggggacttcctaaaaataagcctcaatggaaacttgaaggtacaggaggagacactaggggttgggaacatctctgatgctcataaactggcagaattaatgcaatggcaatggcaatattacctaaagccatcccatggattcattgtgatctccaccaaaattctaatgatattctttacagaaccaggaaaagcaatgctaaagtacatatggaaacataaaagaccctggacagcagaagcaatcctgagaagagagagatgttctagaaatatcataatacctgatcttaactcacactacagagccacagtgccaaggcagcatggttctgccacatgagcaggcatgcagatcaagggaatagagcagacgactgaaaaaaaccacactgccacaaacacctaatctggggggaaaaaagaatcaaatatattcattgagctaaaagatagcttcttcaacaaatggccctggggaaaacagatcctatcatatggaagaaataaatacatcccatatcacctaccctgaagaaacatcagtcagaaagaaatgatgcgtttaatataaaatgagagactactaggggatgcattagaagactttttgagatacagggataggcaaaaactttctggaaaggaatacagtagcatataaaatgtttaaaaaattgacaatgggaaaatatgaaacaaggagcttctacacagcaaagaaaacagccaccaggatgtaaagacagcctacagaatgacaaggattgcatccgtgtggaactctattaaaaaaaaaaaaaaaaaaaaacttcaaaagttgaaagcttaaataaataaaattctctaaattgtttaatctataataagctaatgaactaaatagctcttaaaagaagaaacacaataacaaatagataaaatgtttaacatccttatcagccaaggatatacatgttaaagctgctctcaggaggactggagagatgaatcattagttaagagcttatactgtgtgaattaagttctcagcacctacatcaggcaacttataacatcctataactctagctccaggggcatccaacaccaagacccccatagatgtgcacatgtgtcacatgtatatacacagacacacacacacactactataaataaagtaaatggctttttaaaactgctttcagactccatctccccctagtcaaaaaactatcatcatgacaaataacaaaaattgataatgatatgaggaaaatgtaactcttatctacaactggtgtagatacaaactgctacaatgtctatggaaagctgaaaatagaactaccacgttacccagctgtattactcttgagtacatatcaaacgcaatttagctcagcattccacaaagagacttgtacaaccattacttcactattcacaagagctacgaaatggaaccagcctggatgttttatcaatacataaagaaaagatagcatgtacccacaaggaagttttattcattccataaaggaaaatgaaatcatgacattttcaggaaagtgcatttgactagaaatcattctattaatagaatgaaataatccagactcagaaagacaaatagtacatatttttttctccattgggagctctgtgagtgtgtgtgtgtgtgtgtgtgtgtgtgtgtgtgtgtgtgtgatgtaagtagacatgaaaccatggaggggaagaaaagatcataaagaggagagggggaaataaaagagggtaatgaaatgcatctgacaggaagcaggaggggtctcctatggggagaacggaaatcaccaggaagaaaatgggccggaagaaggcaatgggagagggaagcatttgagagcaacatgtctatgaaaatgccttaatggaacccattcctttatctgctgcctttaaaagaggataaaacattgtatcgagaactcattaaagaggtaacatgtttatagagggaaagtatcagttaggaacacaattgaaaggcaaggaaaagcttagataataacagtgcggtgaatatttttaaagaggataagaaatggagcaaatactgatgttaactgcttaaaataaaaaaaaaaaattcaaaaagaaaaataaagttcactgtgtaggcctggctggcctaaaactcactacataaatcaagctgttccagagctctgatccaagctcaaaactaaaggctgtgccatcacaaatatgtttgctagcttgaacctcacttgagttatgtgaaccccagtattcaagaagtagccatcttctccctccaatgaacacgggtgtgggctgtttctaaggagaaaaataagggacacatgggtctcccgcaggtcctctgtgtatgctgtggctgttagcttggtgtttttgtaggactcctaacagtggaagcaggtgtgtcttgactcttttgcctgcccttgggactcttctcctcctattgggttgccttgtcctgccttgacattatatcttgttttgtaatgttgggttgtctcttggaggcttgctctttgctgaagaggaaatggaggaggggtaggtgagggaggggaggtagagggagctgggaggagtgaagggaggggaactgtgatcggaatgtattgtacatgagaagaacctctttccaattaaatatgcaaataaataaatagacaaacaggaaaacgagccaaggaaggaaagaaggaaggaaggaaaggaggcccaagctgccgcagaccctttgggcccctttgtctgcgtggaacaggtctctagtcgcaggtgggcaaagtgttggatgaaatgacagacagatgcacacaggagaggttgtgtagaatctgaatgtaatttgtcaaatcgagcatcaaactttttatacagaagaaaatagggaagttgggtgacacaccagcaaggtacaaagaggttactggattcttacacaaaacaggaatgcaaacatagaaggtctgacaggaaccacctgggatagaattcattgttaacaactgggatcaaaaagagctccacctaaggtccacttaatcttagaagccagggtcaagggcttcgggcccttgccatagttcctattttagtctattgtatagtccaccttccccctagccattgtaaatacatgtgtatgggtgtaactcagctatctatagttctaaatatctactctggttcctccttaggtctcaaacttccttcttcctagatgatggtaaattcctgtgtaaggcagtgacttagcttttattcaaagtgatagtgtaataccagaggcaattctgaatgtcactgaataggcaacatttttactgaattccaagcccatggtcagctcaaggactttctgggatattggagcactggcaaaggcttagctatatcagaattcaatcttaaaaggcacttataataagataatactaaaagagagcacatagatccatacaccagaccaacgcgggaatagggtatgagtatatgggttaatgagaacgccaaaactgcaggaggtgagtttccgtgaaactctctgcttcatgagtggctttaaggcttcaggcctgtcaagctgactcgacctgagtgcgtggcaccaagcctctgagccccttgggcagttggtttctgatctgatagaatttggacacattgcttgcacacttctgtgtgtgcagcagcatcctggagagaaagaaactcccgcatgtgcgagcaaagtctcatacttctagcctcggatagttggtcatttaactactgcttgatgtcatgatgaactttctagaaatggtgtgtaggggttttcggagcttttagattattcaggcgtcaaactctgaggctctgctcataaacagaggggtgtcctggtaggatctggataattctctctcgtttttttttacacagggctcccaaggaccagccggagagccaggtattcaggtacgtgactcattaagtttttcaacaaagcaagtttagtcttcttgatcgctggaaattactagaaacctgttcctaagcaatttttaactttttcccctagggtcctcgaggtctgcctggattgccaggaactccagggatgccagggaatgacgtaaggacattttccccaactcccaccccatgtctgtttgaattttctctaacttgcagaggtttgaataagttgcctctgtttctagggagctccagggaaggatggaaagccaggccttccaggccccccaggtgacccggtatgtagacaggccttgcctgatttatgtatctttaatgtacccagaagccaaacagcctaccaagcaaattctgctgtccaagctaattacaatgctcggtgtctgcttggtgattttgtttatccccattattttgtagaggggaaaaaaattcaagctgggtcagcattattgtgtgtgtgtgtgtgtgtgtgtgtgtgtgtgtgtgtgtgtgtgtgtgagatgcatacttatctcctaagggtataattcagctgtacaattttgccccaggctgagccttagcatttaatgtctttgttccatgggaaatagagataaaatagatagccacaatttctgttcttctcaattctggtgagtaaatgaatttcattttctaaatgaaggttttcaggtacgttacctccagtgtggtgtatctccgttgatggagtgcctctgaacagacgagatgattaaattatgaaaattggattgaaaaaaaatcacagaaaacgcattaagatactaaccatgtgttacatagttttatttcaggttaaaccttcctatgagtgacagtaaatccctttaaacagcctcagccatcgcacttaaattttcatatggcacatggcattgtattaagagtcctgtacaataaaatccaaatctgtcctctctctgggttcacagatccccttagcgcccatattgctcctgcctgcggtagctgcaagcagcagtgttatccagcattcccttagggccatcactgaatcctgagtgcctctccacagatcctgttacagtgcttctctctgaaagggcattttaagacctgtagcacaaacacagcccatgtttcccaggtgtctgtcttgtccctctgaagtctcttctgaacttccttaagagctaactttaagacagactcatgggctggtgagatggctcagcaggtaagagcacctgactgctcttccaaaggtcctgagttcaaatcccagcaaccacatggtggctcacaaccatccataacaagatctgactccctcttctggtgtgtctgaagacagctacagtgtacttatatataatcaataaataaatctttaaaaaaaaaaaaaggacagactcaccctgccattcacatatctctcagtagcctgataatgtacctggtaaaggagtgatttccttttaacaaatgggtttgacttttgcacatcactcgaaaccaacagcatagggaaaacatagaggttaccaggtggtgaagctacacaatacagatgtatgagcaaagcatccatggtgagcatgcatgctcttgatgaaggaacagagtgaattctctaatagcctggctccttcagtgctgggtgatatgtcatgatgcatgaagccaagccagtgagtcccacggcgagacgaaaattccatgtcccaatttcaactagcatgtcactttatgaaaaaaaaaatacaccaactaacctagtcccttggagactcacagagactgaactaccaactaaagaacctgcagaggctggacctaggacccctacacatttgtagcagatgtgcaacttggtcttcatgtgggttgagcggggttgtctctgactgttgcctgccattggatccccttcccctacctggaccacatggttgggcctaagtgagtgagcctagtcctgctggaactagatgccccagggtggggtggtacccaaggggagctttcccttctctgaggagaatgggaggtggtaatgggaggggtgatttgcaagggtagaactgggaagaaaggagaagggaaagaaggctgcaattgtgatgcaatgtgaaaaatatgaaacaaaaagtaaagacataacttctatgttcatactgcattgtgttcatgtatatgcaaatatccatgggtttgggtttttttctctcttcttaactacagatcgcacttcctctcttgggagacattggagccctgctgaaggtattcttttgctataaaagaaattacacatttgtgtgcaggaaaggttaaaagggaactttctaccaaagatagaattaatttctcagtccaaaaagattcaaattcaaatgttagaaatatgtaaggcaggaaagcatcatattctatgataaattctagcacttatgtgaatcttcccactctgaaattcagggtctcacattgtggatatggggatgtgggaaggcagtatttcgatgaaagacagaaaggggtaacatcattgatagatacctttaagtagatcttgcctcctctggtttgtttgtttgtttgttttgtttttgtttttgtttcttttttgtttttcgaggcagggtttctctgtatagccctggctgtcctgaaactcactttgtagaccaggctggcctcgaactcagaaatccacctgtctctgcctcccaagtgctggcattaaaggtgtgagccaccacgcctggcccaagatcttgcctcctctgaaacgatagctttctcttcctagatgttcacccacccttgctgtgtgaattgtatgtgccactctgtcagctctggtcacttgcaagatgaaagtctctgaatttaacatgcagattgaatttttatgtcacagaatttcacagaatgagctataaagccaacaattgccctaacatctgttaccctgtaaaacaaaaattatctctactgattatctattctacaaagtgccttgggctaaacatgggggcacctggtagtgggtaaagctatgtacgtgtcgtctctgtgtaatctagtaagagtaggtgaacccaaatgaaaatgtagctgttggtttcactcttacatttcttgtctatgaatgaacagaaagtaatgtatatgcatttataccacttacacagatatttcacttacacaacttgtgttcattcattaaagatttatctgatgacttatatgtaaacacgaagaaatggttatagcattgaatccaccaaaagacatggtctaggggacatactggttggggaattaaagttttcagaaaagatatataaatgtaaatattaatatatgctgactcaaactctgtgtgttgagtctttaacaaggtggtaactactttatgttttctaagatgacttcaggtagagcgctgagaagaattagcataattctaaaaccaaactctccttccctgatcttctaggttaatcagtgtgcggggttccctttgaattagggtgcacatcagccaatgatgggctcatcttaatcatttctatgaaataatattgcatttttttcaagaacttttattaaaaccaatttcacttggttttttgtttgtttgtttgtttggggtttttttttcgtttttttttttttttttttttttttttttttccgagacagggtttctctgtatagctctgactgtcctggaactcactctgtagaccaggctagcctcaaactcagaaatctgcctgcctctgcctcccgagtgctggcattaaaggcatgcgccaccacgccaggccaatttcccttgttttaacactttgccttatctaaccaaagaaaatgagactaataccaaacgaatctaagaagtttctgttgagttataacaattaccatcttttcaaattctactaaagtcatcagtgcaatcctctatctgaggatgtttctgaaatcagtgtcctaaggctttgctctattttgctcatgtgtgtgtgtgtgtgtatacagtcataattcatcttttttaaacatcttgaaatgtggaaactctcctgattctattgagttccactttccccattgctgcatggtggatctacaactttatgtgtgttttttaattcttctatcaacttgacaatcccatggaatgatacaggtggtaaaattgtttgatcaactatacacttgattctggtatcagtttacatatttgaaccctagagagaattattccagagtggaatctaccatttctgaggccaagatccttcttaatatcacatatatttgtgttccaaggaatatatttctgggaaccagatatttattgggccaaaagtattggtatgaatggctttagtttttcttgccaattttttttatcaatggcaaatctccgcccctttttctgttcaatgattctccccatgaatgaaaatcacgagcatttttttgtcctaccctgacagctgagccctccatcagtggctcctagtcttagccctgatcatatttttatccaccattttgttttaaataagcttctcacagacatttttccctagccacgtgataagactttggtttatttttgaagcaaagacacttagactcagcctctgtagatcacctgagggttgtggtgacgtcagtggaatgctgatttcactacttgggttattagtttgatatgctacttaatcttgctgcttaatccaaactttaatatggcttcccttcctcaacatgctaaaaaaaagttaaaactcgtattgcgttctcaaattacatttcccacccccattatttattgggagttttcctttgaaatggcatcagagatgtatgtgaggtgttttcatttttaagtacgcgttcaccaatattataaaccaagattaatgattagggttgtcagaatttttaaccttacaaaaagtcatcttccgaattggacacacaggtctctgaaagcagaatggcctcacaatcactcattgacaaggttcaaacggatcagacctcggtttcttaaatgggttttaggaacctctcagtatgttgtctttatactcgctagaacttctgtggcaactgtcaagccaatgtccctgggctgaaaagcatcaaaggcgatgacggaagcactggggagcctggaaagtatgatcctgcagccaggaaggtgagcgctttgttgcatgtttgcagcctactgagctcctgaggagtcctacctcagagctctgatacctctctgtctccagggtgatgtagggccacgaggtcctccgggattcccaggcagagaagggccaaaggtaagaaagtcttccgagagatttgtcaaactctctaaaaagtagaacttacattggcaatgttgggcaggctgccattcctttctaccctgatcctatccaaatgacggaccccgggggttctgatgggaggaggggttactttctttcccctattgttccaaaagacactgaaatggtccagtattagctgaagttgctgtctttttagggaagcaaaggagagcggggctaccctggaatacacggggagaaaggcgatgaggtaagcgattctgctgttgcttctctctcctgatcaaacagaggaaagatgttgaggcgattattattctgagggtatgtgccaaccatttgttgccttcaaatatcccaactaaatgccacagagactcttagatttataataagccgtaaagccccacagctgggcagacatcagacctctctgctattttgtttgcttccttgtcaaaaatattacttgtcataaatttcgtttgagcacttcctactccatcatggcgaccctcatggccatgagctcccaaaccacaatgacccacaacaccctatggagacttccttccttctttttctctccctcgtggtccctgcctgagaccccaggcccgggaatgaagctccacctacctctcttccacccagccacaggctgtaggcatccttattaaccaatcaggaatgacttgagggacaaagtttacaaaacaaaagctagaataagtgaagattcactcattgggggtaaccaggtcttgggagccgatttttagcatctggatgcacagcagcaccagactaactctaacaaaaagaaacggggttcgccataatgtatgtttaatcccaaaaccatgagtatgtatttgatttaaaatagcacattttagtaattgtcgatactcatttctctatggtggtacaaatatggagacacagcgtcaaggctaaaaattactatgaaagttatggggtttcaggtctcaggtaattatcccaaccctcgcaggatagaaagaggaagagtgtaatcacagaaagaaagctcagggtagctaagagagggagagagcatatgaacatgtgtaaggatgagggcagcttcagagcccagctaagagctggggacacctctctaccatgattcaactttaacaaccttggtttctctaagtcactgctcagcttccaaatgcctgggagaaataagctaagctaaggatcttgatagaccggtttaggccagccactcacccccagcaccgagcatccaacgcagatgtggttttgagataacggtgtaattttctgacagtaagccacagtgatgctcaggacattattcttgccctgcataactcacattaactcttagaaaaaccaattagaatgatgaattgttgttggtttaaacagttttggtgctaatagttcttaatgaaagtaagaaagccatctggcatatattaaccttgatggtagtatgggaaattatgacactgtaaaatagatctattttcctggttggaactatatttcccattacaagctatcatcatttattattggttttattgatattcattgtgttctggaaacctttaagattggctcgggattgttttccaagttaaaaaaattaaagaatgagaagtacggcatttattttcatttataaataaaacattgaaggcatttgttttgaaaacaagtaagaattaatgagcttttgcttcctcaagttccacagaagatttctgtaaaatataaacacagcaatgggttttaacaggcaggcaggttttaactgcctagattcaagaggtgggcttaagaggcaattgagagggtaataaaaaacaagggaattgagaaataattggaattggagctttttatgagtgactctgttgaattcacgagaagttaatttttattgattctgtgaggtattttgccatcttggtgagctgaacccattgttaatatccctcagtattttagtgtgttctttcttagacacactttgtgcactctttgacatggatcacacgaaattctgcagaggactcactagagtgcaggaggccctcttctcttgtcctctatataccaagcgtaacgtggatgaaccaggcccaatacagcttttgtctctcgcacagatcagtaacagcaagtgattgcatcatctacttccactcaaagaataccatggttacgtacttggctggtttgtctgagtgaataaaatgttagccaacaatatataccttttcaactggccaacagactacattctgataacagacatgcattgtctctaatgttacaaagccacaggtgtctattcttcattgaacgaaaaaggtacagagggaagctcacacctttcggagatctaattttagaaacaacagtttaattcactaagctagaggaatcaggcatttgtcaatgttttgaaaagtgacttactctgggttcttcatgttgctgtataactcaacatcaaattgcaaagtgttagcagagcacagatcctacattttctagccagagaaaaaaatttgactatatgtctttatataatattttatgataataaatgacaaagaaggcatgaaaatgtcgttattcataaagcataacaatgatggctgaatgcctacgcaatagattttaatttgagttttgagtttgatactatgtgctaaacttgtccatcttgctcttgagtgtcatcatccttcaatagccattgggacttacaaaatcttcataccaccccttatgcctctgcggcagctttcactcttgtgacagaatttcgagcacctgagagaaagactgctgagaaagatgggttttacctgtgtagcagggtttattttcaagattaatgctgtcatcagcacttaatgactcccatgtttataaattagacaacctgaaaactcactcaaagttgagacttaaagtagggaagagagaaagatatctacgtaagtatatctgaaacagatatatgtataaaagttatggaaatgtggattttttttaagataagaaaatttctcatacatgtgtataagcttcagtcattaaaaagcaccattcccagtggaaaattgtcctttccatttacaaaattataaatctgtttataaactcgcacaagtgataataaggaaatgaaaagaggtagttcaccaaactgatacatgcacatgtgtacatatgtgcacacagcaagccaaaggggttgatacattcttgaagataaaatgaatatgttcttcaatacaaatatacataagatttttttcctgatacttatttcatgaggcattccagcacattcaaggagatcttttaagtatttcttcatatcatacctgtcttagttacttttcttttgctacaaagagataccatgaccaatgcaatatacatatatatatatatatatgcatatatatgtgtgtgtgtgtatatatgtatatatacatatatgtgtgtgtgtatatatatacatatatgtatatttagatatatagatatatatttgaagacttttatactgtttccaagttcatatgggaagcatagcagcaggcaggtaggcaggcaaggtgctggagaggagctgggatcttacatccatccacaagcatgacacacacacagagtgggggagtctggacctgaaggagtctggcttttgataccacaaagcccaaccccagtgacacacctcctccaacaaggccaaacctcctaatccttccaaaacagttccattacctaccaactaggaatcaagcattcaaatatatgagctgattaaaactattcacattcaaactaccacagtatctcatgaataaacctgaagcaatatgtggtctcaggtgttggataaactgaacttattcttaagcctattggtacaaagaacctcgatccagctcaatcctgttgatacctcgtaaatacagatgcagtcattttaccacagtcactttgcccgacatttataatggacataaaaaaaccatcatttaaggacaatagaaagaggatttctaatatagcaaataatatctgagcagtataaaatattttaatcagtagagaaactgactcttgaaagaatggcaccatccaatccagaacttgggtcttgttttcttcgtatgtttttgcttatttgtttggtcggcatttatactgatggaggttgaagcctaagcttaatgaccattaggcaagtattgtaccactgagctacagccccagcccttccttctagagcttcatgcatttcctatgactctgaagtaacaaacaggtgaataatatttttctctaattaaaatgtgatctaagcctctcatagaaaaagtggtaaaaaacctaaaatttatgtctgtccccacaacacaccaagtaataatgtgtgttgtatatggtgtatggtcatagtggtattatagatggcccacaatccgaacaccagacagcctctgaaagtgctggaaatctcctaacaccaacatgcaacaattccgtttttttcccagggtcttcaaggaatccctggcctctcgggagctcctggcccaactggaccccctgtaagtatttgctaagactgcattcctcataggccatacctataggctgatacatggtacattaatattcctggtgcctttcctgctctgtatctctgtatagcccagccattgccaagtaaagtagccccttacagcactccaactttcaaataagattatttaagcctgctcagtgtcctggagacttctcttcagaatttttgccaagccaaagagctgcttctcgctctgctggaggtagagtcctcaagtacactctctccttggttataaatttttggcactaaccttagaagagatattcagatgccacacaagctgagaattttctaaaggaaaatagcaggccaaagattatcagctttaatttgttgtattcctgtatgtgaatttttttaaattctgttttgccaccccctgaacacagcagtatggcctttgggttatcttgtttttctggaacagaatcttctttcatttccaacctgacaaacccaatctcttatttagagtttaattctaagcaatcccaaggttcagttgccagataaaagatggggcacacaatcacacttgagtttcagaccaacaaataatgtttgtttaagtttgtcccaaataatgcattttcctttagaaaccaactccactaaagtcaatgtctcaacttccctgtctcttctcttaaagtccctatgccagtaaattatttttatctctcaaataagaagtgatcattcgattaatattttgaggcataggtttggtgtaactaaaagtttatcatttatgtttgtatctatatagtaaaacttaaaattatgaaagagaactgtaaaagaaaccacaagaattactattaattctactctcaaaggagaattaagattaacttttgttttcctttctacaatgcagatcacataactcagtatgcacatttttcattctgcccagtattggagtatttaagatgttgatcactaccaaaattatacctcatttagaaagacgtgttatgtaaattggcatttaaacaggaaggctaaattcttaagtgtatcaaaaggtttcaattaaggtcattaaatgtggttagccaaggtgaaaaaaaaaaaaaaaaaacacagagatagaaaatttaaccttctaagggcttatcaggaaaatacaggctgctgtatcagcctgaagaaatataagctggtagaaccaatttaattagggtcaaatgaccttcgaaatgggtaggtttaagcggtcaccttccaccacctattgaccattggcttgttggttccataacaacaagcttttcattttttacagggcttaacaggaagaactggacatcctggtcccactggagcaaaaggtgacaaggtacaaaggaaaatggggcttgggttaggggtaaggtgggaccattgactgtgagctccattcaatcaagggcagcctacaagagcaaatgacgtatgctgggcagaggctactcgtggagtggacttgcaaagatgttggtctaaaagtgggtccaaacacaggtgttcatagatgagaactctgggtttggagatagaaaatccaaacggtttagaagctgagacatccgtttgtgaggaagggtgactggttcaagcctcctaaagaggtaaaggtaagctggattgtaatgtattagagacttccagctatggctgtcttgttctctttggacttttgttatatatatatataaagctagaaaatcccccaccaaagcactggtggttttggtagctggcgggcccattttcttattcacagagggcatgttctaaaggagtctttgtgtggttcaacagtaacgaagctctttcaggcttctttataagggcactgatcccattcatgaaagttccaccccatgacctatctcctaaagggcccatctacttcgtcgtcctatgagtaggattcatgctgtaagtttagaagaggaaagcccaaacattccaagcaagctccctggctccagatgatgtcttgctggctatcaagacaacgatcagtaaccaaggacttgtgagacagtctggtaatgctgtccctaaaagaccttggcaggaaatgactaaagccatgttcccttggaagaagaatgtattagttactatagttgctatgtcaaaatatctgagaaaaccgacaaaggtggggagggtttatttgcacttacagttcaagacctcagttcatcgtggtggggaggtcatggtagaagaaagatcttgaggtcttcagttcacgtctaccgcatcagaaggcaggaagcagagataactagttgaatacaactgttctactcccttattcagttgggcctccagcctgtgtgctaatgatgcccctattcagggtgggtcctcctactaaacttttctggaaacacccacccagaggtgtgttgccatggtgattctaaatctcatccaaccgacagtgaggaccaaccatcacagctcacagctgggtgtgtgtgctgtggctgggagagaaaaccaacagcatgggagcatcaagctgtcatggtgtaagatctcacttccaggcattacagtgaccgtccaggcatagccaccgaatggatgaagtagctacagctattcagattaaggaaataagtgcaaagaactacagaagctgcttaagtgtctcctgcacgcacgcttgccaggatgccacatcctgagcagagggaagcgtgatggaatcaagatccccgaggcactgagaggaagcagtgtgctagagagcctcagcacatttttatcctgttaagatcttaaggatctctctgtcccagcccctttcctctattttctatgaaaattattcagcccttgatttgcctttgaagctaatgggaattccacactgaaatgagcatgagggcacaaatgagaatattccttctgatggtgccagggggtggggaggagtgttctcgacaggcacatattgtttgttgactcatgagaagtgtgatgtaatgctctgaagggcattggcagaggtcaacagaacagggggagtcttagggggacggcaaccatcaaagctgtgtgggaaagatacagcacacttcctcagcgtgcgtgcacgtgctcgggcagtgcatcgcgtgagaaactttactgtttatgtacaatgataaatatatggtttgtgatgtgttcctttgttggtaggaaacagatgagtattgaaataagatcttcagtccagttctgaaagaggactgacatccctcaaaattcctgggcatcatatgctctgtgttgtcaccatccctgatagatgtgacttagaacagttttataatgataccattctaaaagcagtgcgcagttataggaacgactcttaaaaagccaaaagagctgcagcaactgcttcccatgaatggactggtcagtatttctgtgctttgtaaaagtcacttaccaggtttcagttcaaaaaaactcacagaatagttattggcccagtaaacaattattggagtcccacttgcctttagatttatgtctcctacaagctatttacactgtacaaaccatttcccttaaatagtgtcatagcaaaatcatcacttccactcagtcaaacacacctcacctggttcgatatgacactggttgggacttcatacttcagttgcatattccattatgaacttgagggagtgaagatgaagccaaaagtaaagattaatccagagagccacagtctccaagtccacaatttattcacatgaactctaccctatcccccacgctcacataggaggaaaaatcccccacctgtactcaaagcccagggcaggtcacctaactggtctacccccagtgaaactgtcactcctagagttcgcacagcgagaatccaggtggacttgaaaggggttattcactttcctggagtggggaaatgtattttactgggttaagaagcaagctaagcagaataggatcgcaaggctgaagccaaatgacaagccatgatgatttcggaagattgctttctgaacaacctggttcacagacttggagtagaaatggccaaaccattaattcaagcctgtgtctctcttgcagggtagtgagggaccccctgggaaacctggacctcctggaccccctgtgagttgtttgaggttttaattctgtgtacttatgactcatacgtaggttacctagatgcttgcaaaacaaaatattcagttgagtgtgtgcttttgtgactgcttgtgtgtgagcatgtgtgcctgtatacatgcctgtgcgtgtatgtgtgtgtgtgtgtgtgtgtgtatacgtgtgtaaatgacatgcaatgcagcattaggtgggcctaacccgtctctatttcagctcagctgcagtctgcagtgtttagagttgtttgtatagtgtgaacttcttttccatggaatccggacgcctgactctctacttccatcaacggatggagaaacatttgactacacagatgataaagctccacagatattaaaaggcctttaagaagacatctttccaaccacgcaatttgctttttcaaagatgttgtttatgttcaccccataagcagtgtctgagacgggaagacattctacttccagggcacgcagtgagaaaaatgccccagggctctggaggtcttctgccctagtcagccacacagacttccagggaggctgtgcagagcagcgcggcctctctctgtagcaagtctgccctcttgtggagccatgttcgaatagcagcagagctggggctcacacgtgttatttcctgcattacctcgtaggaacttaaaaatccaaacttagcagagaaagggtgaagtctcacagtagctttctgaaaactaaagagtatgttatgagtctgggtatagttgcatgctttacacacaaattaactgcgttggcctccgctttcttaaacacattctgcatcggattcttccttcacatagaagcaagccagacaactcacagagttcagattctaaaaatgtcatctcctcaatgggggtaaaaagcaaaatatatcatgagaccgttaaagaaacctgtgcttttctataaggcttaagaaatctgcctcttgtctctagatttttttttttaagccagattatacatcttctcttggaaaacattcttacatctattcgaggccaagtatactgaaatatagcccatgttcagttattgccaaaagagtgaagaatcaataaaaggataaacagacagagcatcctcttctgtcaccactgatttgaagatgcgtggaaacagtgctcgctgggcacggctacctctactgttatcctcaagcagtaatgaaataaagacttcctcatttttacagctgaggtatagaaaaaataacaaaaaaaaaatgaaaacacacttggattttttttcttagagtctgttatcctttctaggtgtttccaaactgaatgtttcgtgtgcatttttgcaaacatggacgagagttttcaagctacacaatgagtgcagtttcatgctctatatttatgcatcaaagttttagttttgttgttttgtttgtttgtttgtttgttttgagcaagttcttgttccctggttattaaagacatcttggtagaagcatccacacagggtgttatgagtgacgttatcctcccattcaccttaagtttctgtctggcttgaagagactgtgaggaaacgtcactttgcagttggcaagctgttccctagtcacagctacatcagtccgacggcatggctgcctgcaggtcagcaggctgagaacacagtaaattggctattcagacactgaattttaatgagcagatagtattttttcaaccaattgcattagaacctcatgtgccacacctgaacacgactcacactccaaccggaagcatccaagtgttccagacataagtcaggctcctttgtccagttttccccactgttttaaaatattgaaacactgtggtatttggtttatggtattaaattcaccttaaatatagagtagggggaaatttaagtaaaagttaatatagaaagaataccatctgataaaatgaccaaagttccaagtgctaacttctgtgtctcatttttttcctaagggtgtcccgctcaatgagggaaacggcatgagcagtttatataaaatccaggtacctccatgtctaattacctatgatgtatagatctataatctataaattcttctcatctgctttctcttcccttgaagggaggggtgaatgttcccggttacccaggacctccgggccccccagtaagtacagatgttctgtctttaagttgccttagcttgatcacaataatgatgggagatgggtctgccttgagcttgctggaaactggatgtcacaaatatcacccagttttacagaggagtaaagaagtacaactaatttaaataaaagaaacagtgagcaaagccttaattgtggaaaatatttagcatagcattgtctctttccttatagttaatctaagctctagatcaatgtccaaatgtgtccatagaaatagcaccatgttgtttctctaaacttattttattttaatgatataaggtggatgggggctgggggagggggttatatgcatgcaatatgcatgcaattcctgtacgagccagaagagggtgctagatttcctggagctagaattacaggtgtaagccacacatcatgggtgctagaacctgcactcaggtcctctggaagaacattatgtgctcctaactactggaacatcgctagacctcaaattatgtttctaaactttactctaaatctaaccttcagcaaagtcagaatacgtacctttcttatatttgttaacaagaatttgaagaaagtgctccgggttctacaatggtggcttagtcgtaattaaactacctttccacacctttcttccagggtccaaaaggtgatcctggcccagtggtacgtatgttcctacttccgtgaagtctttgttaacactagaaaaggcaccaggcaaagacaggctgtcatcttgggtgtgtatcagtgaaggtgtcagacaagcaagcaaatgaagaaatgtcagcaaaatgtgttctttattttcacgatgctttagtccccattctgtgcctgcccttgaggctctgctgtttcctttagtgggttttaaaaatcgtcctctgatgtaggaagacacatagaatgcccttgataaatagaacactttcctctgaccgccttctttggatgattgatgcaatttaaagtcacttgtggaagagaaacacttaagggagagaaatcccttactatgtctgacatctcaccaaccagaaaaggggagagggttgtttatttactttgcaagtcttgggcaattattctgcagggagcgtagactgtcatagcccttcatattgagtggaagacagcaggaggttaacactcagcaaggaaggagatcatgtcctccagctgccccaaggatgataactgttctcagcatctctctcaacggtggagcatccctgcaaaagctctgccagattcaattagattccctctaaccttctgcacttcttttcctgccatgtcctttccaagcaaatattccatcgttcaggtcctatttatatatccgttcaacctttgagggaagaagtgaaaattaatgtacctagtactgagataaactccccaaccaccttctgatgctatgtgggaaaaaaatgagtcattttactataatggtagaagttggtaaaactgtctgaaagaaaaagcattaaaccagaagagagaaaccatggaaagtgactttttcaaaagagagttatcaaggaagttatcattgttactggtcagtatatattagatgtctatctgatttgctctaaaataagtatttcaagtccttcatactatattctgaatcccaaatgtgttatatggaagttaccatttctttgtttgcaacatttaaaatactattatatatggtcatctagaaatatgttgttcatttttatttctatttctcatcatattgataaaaatctccccctagtcttactgtcctacagacttttaaaataggaccgcctctgagtcacagagagaaatttagacttctcattgacttttctgggatactctttaagttctaatgttaataattggcagattagggtaagaaaaaaattaaatgttatactaaagagtacattataatttattagcactggaaagaagctggccaaaatataaagactgtttgagtaaaatttgaagaaattaggtcccatatttcttagctgtgacagaacaaataataaaaaaaaaaaaaacaactgaagaatagtctctgtttagactgtgagcttgtgtgaatgaaacacaaaaacagagatagaacgctgtggggttgaatattgtgtgaacatccacacttaccatacaaacaaaattccctgaaattactcccctgagtcctatctgcctgtgcacagccacccgccatactcattgtcacacatcatctgctgggtctggagaaaccacactccacggcacaggaataagccaggagtgagagaactactgaccgagtacgcattttaaaagggaacacggatgaggtgggtaggggaatgtcctttctgggtgtccttcaagttccatgacaagctcaagtcagcttcgtgtcactgtgacaaagcacagaaggaggaaacgttgttttgactgacgtttcagaccattgtccgccctgtggtgagtcagaatatgtaccagggaacacttagggaggctgagctgctagtctcacggtgacacaaagcaaaagacctctttcctttataaccaaaccctgtccctacagcccattaagctataagtctataatgggctaattgatatggtcacagccttcatgaccccctcttctgtgtgcagccacattgcagatcagcccttaaattcatgcactttgaggggggtctttaagattcaacacacaacacgtggcaataataatcttctgaataagcctttatagaggaaaaaattaccttaaattgaatctgcgaataactagatggtttcctgatgcaaaccacttttttttctttagctattcaatgtctaaatgatttcaattaatatttaattactatgtacgctcaaacaaatgctgattaattaattgattgcttcttctatcctaaggaaagactgttgagagggtaaacaaagaaacatgatactaggaaatattccatgcatcaataactaggagcccccttcatactgattcacacagaatacaatctgaacacgttttatcatttattcttatgactggcaggttatatatacatatatagtagtgagaattgttttgaattatgaaacataaacataccaagttgtatgcccacttgtttagtagtgtgtagtaggcaataagcaataatgggtgtacagatttagaagtctttcagatgtgtattttctgtacaaaaatacatctacagagaatataatggaaacgcttgctattctgtgttacattgctttttatttgtttgttttgagacaatatctcactgtgaagctctggctggctggctagttggctggggaactccccttatagatcaggctagcctggaactcaccctgatctgagctctacctgccttagcttctgcttcccaggtgctaggattaaaagcctgcaccaccacacccagccagtgttgttaagtttaaaatatccactgtcctaagaaaatgttaacagttaacagtaatttataaggatttatcagataactctcactttacctatttctctatttttctaaagatttttttttgtttttctgtgctttgcttgcatatatagccatgcacaacatgcatgcagtacccacaagaggccagtggagggcattgtatccctgggactggagttacaggtggttgtgagctaccttgtgggtgctgggaactgaaccaaggtcttctgcaagagcaaccaatgctcttaactgctgagcctctctctgaaccaactctacatccttcttgatcacaaggtttatttgttcaaataatcagcatctttcaacatagattttccaaatatcttacttaaagacatatagtttgggacagtgcagtagaatatatataaagggcaaatgtttgttttgtttcatttcagtgctgtgtatcccctcctagcgcccgtcagcttgagcaatgacttagaatggctggaggtgcctctcctgggtgatcttcctaagcatttacagtcgtgttaaggatgctacaagttctgctttgagtgctccagtttcattcgctcataaagagttcaatcttattatatcataagctagtagccccaggtgcctcacaaaatggcaaactttattaaaatctgctcttcattttaactcttgctaaaattggagttattaatatactagagggattcgtcctgattagattcttaatcagaataaaaacaattaatcagaaaatggactcatgcctggagaatagctttaattcccaaactgttttcatatacctaatttgaaaaaaacaggataccgtccacttgccaagtttcaaatcagaattgaggagcataggacataaagacgctgactttaaaccattgcttacaaacctctggtccttattcctctttatagggagagcctggtgcaatgggcttgccaggactagaaggatttcctggtgtaaaggtaagcacagaagttaaaaatgcattcattcatcttcagaaatgtatatgtacctcctatcatgccaataactgtttcatgaaacataaaatgaatgtataaggaaatgaaacaaatgaatcttttatacttataggactcattttctagggcaggatactgggactagttgtatatgcaagatagaaacaatgatatcacaaagaaattaaagtagaatgggccaggtccagagagatggctcagtggttaagagcactgtctacctttcagaagacccaggttcaattcccagcacctatacagcagctcccaactatctgtaattccaggcaattcacaatcctcaccaaaaacatataaaaactgatacacattaaataaatgaattagtcctttttaaaagaggattaaagggctgcatgcatgcttggggtgggagcccccatggttatcatatgatatccgagaaagtaagagctgtccagtggcttaaaggaggtgagttagccacgtggagcagaaacaacagatgttaagatcttgagacaggccacctcctccaggcataataagaaggtgagtgtgtggatgcagaaatcttggctatgaggtccgagaagtcttagaacggtaccctcatcacatggaggagtgctgctcagtgtggccactggaagaactgtgctgtctgtatccttagctacaaggaacacgagagatcgagataagctcccaagttatatagtcttctagtttgctttctgtggctgtgataaaacactctcaccagaagcaaattgggagaacaaaagggcttgtttggcttgtgcttccgtttatcacactccaccatcaagcaaagtcatggcaggagcccaagcaggaacctggaggcagacaccgaagcagccatgaaagagtactggctactgacttgctttccttaactcactcagctgaactcttaagactgcctaggaccacctgtccagtggaggcatcactcacagtgggatgggccctcccacagccatcattaactaagaaaatgcccagcagacatgcctagtgagccattccccagctgggacttcctcttcccgggtgactttagaatgtcttaacttgtcataaactaacgagaacatctagtaattttggtaaaagttgtctcagagatgtgggattggtgcatttatcttggttcatggtatattaaaaaattagtaagctcgtgcttcaaagcaggaacctaaataagcatgaacaaagagggttatctgccagtgtagactttaatctttgaccctaagcaaaacccagagccattgataagaacagcacagccacctgagttggaaggaaacaaagacagctagaaggtggtgtttgtcagctttgtaacaaatgcctataaagagaagactgagccaggtgttgtggcacacacctgtaatcccagcactcgggagacagaggcaggcagaaagcaaagattgagagacaagagagggtggtggtcgcagatcaccccttcaatggcatgactttgtcctgtgaggcttcatagactaaagattacaccatcttccaatggcaccacagactggtgaataagtcttcaacacatgggcctttgaggaactagagcacaggccattccagcatccaggtggaagctgatgttggctggctcagggtagatatggtgggtagaggaagaaatgactagattatagacactgtttgaggaaagaataaacagggttttctgattgattggataaaggtaaggaatagagttgtcaaggaagactctaagttttgtgactaagcaactagcatgatgggtagtcaggaagtgaaagaaggaagtatgaagaagtcacagtcactaagcatagtcagatcagtccccacaattacttacatttctgcagccaagagcggactttcaagtaaagatagagaacagtagatgagtgggtttaaacgatgccctagctttgataagcgagcacttaagcccagatatatgaagagaagattaatggtaacaacagggagatatgaaagcaagtgactgcagaattttaactgggcataaaagaatcagaccatggaagggagtggaggataatgaaaactttgaaccataaatgaatcgagggccttggcatgctggtggccaaaagctgaaatgttcaagaatgagatgctgggagccatgtacacattgactgtactcacacaggaggcaagatgattagggaaacgagatccaagggtgtgaggagtctcaaaagtggaggctttcggaacactagcatttatcatatcaccaatttccactggatgaaacattacagtatagtcacgataaaaacaaatgagaattacacacgtatatccttttcctggatgttttttcctttacattttagttgacccatgaagttcctatatgtgtatatagtagattgcagtcatatcagggctgctgtgatatcaacacttccaacattgggtatttctttgggacaagcataatggaaatccgttcctctaagttctgtgaaataaatggcatgttatcaccatggcaatcctactgtgaaacaacacagtggctcacagccatcagtaatgcgatctaatgtcctcttctggcaggcagatgtacgtgcagatagagtactcatatgttaaataataaataataaataaattcatctttattttttaaatgcctttgtattatcccatgtgtaatcaccagcatacgagacattgtcagctgtacctgaaacatcacactgcctcttgaagagcacccaacacattctgtttctcagagcaattaaaagggttttctatcaggtcagcagaggagagccacagatcttcaatcctcagtctttctcttctaacccttgcatccactggggtgaggttaagaaggggtttctagaaaacattcagtacgattaatctctcaggtcacggtaatgatgttttttatgggtagaattttaagtattaactagctttagctgtaagaatgtatggtttgctcttaaaataagacagaggaacatcatgaatgatgctcttcattggggttatgaatcactttgctatgtagagggagaaaacgcaataggttgacttgtgccttcattgttttctgctctgctggctttctccatacacgctaatatcagtagcacttatcatagccaagcaaagcgttacaaatccaatttctttgaatgatatacctttgtatcatttctaccccttctcctctccctccaactccactaccagccccacaccctctcaaattcacaacatcttcttcactattacacacacataaataaacagcaggtatatgaagacgacctattgaggacatttagttttgtgtgtgtgtgtgtgtgtgtgtgtgtgtgtgtgtgtgtgtgtgtgtgtttaggcctggctgtaactcttgatctaggtaagggtaaggctttgagattttttttcctccatacacaacagatgtcaaattactctttgagcaatgattctaaaagcgaagagtccatagacatcattgtaagtagacatttctatctttatcccaacagggagatcgaggcccagcaggccccccaggcatagccggcatatcggtgagttgggtttatctcatcttagcttcttacacattttctgtgcccatacccagactgtagctactggtcaaggaagcttggagtatactgtgactctgggggcagccactgcccagagcttgtccctctctcgaccctggtgtgtcttttcttaattttgatctttcttctgtttttccttcccaagtttcttagtaaatccatggctgtgtgttagtgtgtgtgcacagctctgaaaactcacttgttgtatctctgtccctgtcatatttcacagttctccatcttccaagggccaagtgcttatcctggggcacacacattaggctccctcctgcacacagctctagtctgcccggtgtttgcctcacccagggttattagcagagctttattgccgctaatgttccctcataaaccaggcctctgtcctctccatcatttttgttgctctctggtgtcaaatgcttttatctcatcaaggtcttcacaaatgaataggaagtgctcccagaaaggttgaagtcatttctatgagcccttgggatacttctgatcttcattcatgataccctcattaaaattttgtggtcacggtttatgaataagaggcccatttatctcttgccaggtgaccctgcggggaaagtccagttatcccattgcaagaaagtcagtggagaccatatgctcgggtagaaagagcattgtgaatacagaaagcaccttagtcttagccccaccccactgcagctacgtgacccccacaccacctcaaaactccggccaccatccctaaagaggctcacactccctccccattactacactgagctagctcaaataaacaataaaatgctgccagtcatgtacatgtcttacagagaatgactttttttattaaatttgtctagactgagaccaggtatgtgtataactgtaaaggaaaaaaaacaaaaaaaaacaaaagataaaagaaaaaaaaaagaaagaaaactaccttctctctcaggcactcttgaatttttgtaaaatgaggatccttcttgaaaacgggcttcacactgaatctcagaccctggacccacccctgccactcttcctcatagtgtggggctctctttctggaactgtactcagaatgccattccaaactgctcacttacactcacaaagaaattcatcttcccactgcattcatctacacaggacttcaagaaacgttccgctatgaccataaattaagtctgtcttcaaagaatgatcactgggtaccagcaaagacatcaagacatgtatagtaatttcaaaagatagttcttttgagcaattccagaagtatttttggaggctgtaagttggctgaaatatcaagacattacatttggatacctaacatctgataaatgtactttaaaataggatttcacaactcccaggagcacttggcaactccagaattaggaaagggtttaaacatggacctagcacacgtgtgcagttgtgtgatttaaagtgtctgttttttacctggtccttggaaaacaaaacagttaagaggccctacaagtagtgataatggctacaaaacagaggacagttaaatttcatcattgatacgtagagatagtgagatatatttcagtactgtctaaatctatcgaaatgataattgtagttgaagcaaagataaaatcagttggacatgtcatgcctactcagtggaggtgcacagaacccactcctgccctttctagaacagtctgcctctttccagtgtagatgaggctacccagggctttccctagaatttctctctttcttccttctctgagggggatagcctcccagaattctaaagcaggttgaagagggggcctagccctttaaagtctctgatactcacccatatacccacactgagtttcccagacatgattaggcctacggagtaggaggctctcttccagcagcaacgctgccagcttcattttccagtctctgctaggccactatgctagctgccttctgtgacaaaatatttgacagaagccacttgagagccatcagacatggcagctgaggtaggccgggcaggggcggaaagagcctacagtgttgcttcttcaaatgttggtagatcaaaccttagagcactcaggcaggacccagaagtagatacaaccttcaggaatgacctctgagaagcctaattgtttctctgctggtaaaaccacagcctgaaggttttcaatctccccaaactccaaactgccaccagctgaagaccatgtgttcaaacacataggcctatgagataaactccatgttcctatctctgctctagtgtctcctgactctcagttctttggacaaggcacactgacaggtttttaaaaaataattattttcctcaaccttttacccaagcacagcttttcaaatagaatgtgcttttcttttcttccgattatcttattaccaacatagaagctctcctgtgaaactccaaacctgatagaatttctctcactctgccttctttgtcctagtttgctctctattgacgtagttaaaaaccattaccaagagcaacttgagaaggaaagagtttgtttgaaaggcttatgtgccctgatcacagtccttccctcaggcaaatcaggccggaaacctggagcagagaacgaggtttgctcaccctgcttttttaaacaacccaggaccaccaggtttacccctaccagtgcccaggggtagcaccacccacagtgggctgggcgcacccatgtcaatcattaattaaggaaaccttccacagacttgccctgggccaatcttacggaggaattgcgaggatcaaggttttttttcttattaaaagactccagttcatgtcaacttgatgaaaactcaccagcacaccccatctccgccccatccccaccccaaaccaccccctagagtaaggaagagctaccaggcaaaaagacatagagatttctaatagtgaggatacattgtcttcctgtgttcgaaagcatccctggctccccctcggcattctcaagtgtgtactttgcagcccctagatcgtgtcctggtccgattactgtatatactagccctataaactccaggaagtgtgtggaatcagtagcgtggttcttaacatttttatttgattttgtcacagggaaaaccaggtgccccaggccctccaggagtaccaggggagcaggtaagctaccttttacaatggataaactgctgtcatacccaggtgctttttaaagacatttttaccaatgtttttccccctttgggacacgtttgtagggtgaaagaggacctattggagatacaggttttcctggaccagagggaccctcggggaagccagtaagtacttgtttaccttctagaaactgctgtctaaaagctgttctaagcgttgctgcaggagccgtggatgtggggaaaagaagggagtgggagagaactctagtcctgccagagttccagtgctctgggcggattccacacggccccgggtgggtgtctggctgttaaagccactgaccccactcagcgggtggtggacaagtggcagccctaggtaccagcttcttagtcttgggcatcccatgctggaaaccgcaaaagagctgagaacagaatggggccctggggcaacactgggcccccagggctgaagggaggagagagttgggggagagggggcactggatggttccaacacgggcaagagtccttggtcaggtctatggctggagcacaggatggccttctggcgggaggttagataaggcttgttaggagaaagcccatcccatcgttcaccacaggccttgatgatcagagacagtctatggttttagagctttattgtagaaaggcagggagaaagagagaagggagaaagagagagagagaccagtcataaccacgtggagagaggggggaagaaagagagggaaggagggctagagatgagagtaagaaaggtgagagcttaaaagagagcaaggaggggccaagcagcccctcttatagtggtctgagctatcttgctgttgccaggtaactgtggggaggagcatacctggctatagtcaggtaactgtggcggtggagaatgccagaagcttgggacattgtgtgactgatagtcacaggattatagacaggcatctgactctgggaatgtggctcgcctttctgtcccttgtagggctctccactgggtcaccagaacaagccccattcaaccaaaataggctgcctatcacagccccacacgctgcctcttcatgttcctccttagaagcttagatttgagccagcggcttcagaaggaaataggaacaggttctaaatattgagttagtggataccgacaggggattccttccagaactttctagaactctacctggtgtctttatatcttaagtaatggtgaggagaagtgaaactttctaagcactggtaaagtagactcattgttagttctagtaacttcagcagagttaaaattaaatggtctatcaggtcttaaaaacatgaagataccaacaactagccaaagtagtgcctgcatgataaactaaagcagaaaaatctcctctcaggctcctccttcatatacaggccttgcccggatactgtcattgctaacactgcaggggtgtgtcatgcccatcccctaaaagagctttgtcacagtcacccccccacctagcatatatatatgtgtgtgtgtgtgtgtgtgtgtgtgtgtgtgtgtgtgtgtgtgtctcctcctatgagctgaggatatgctgggcctggagctagggactcgaagttctggggtgttttgttttgttttaagggttctctctctttctctctctctctctctctctctctctctctctctctctctctctctcaatggttgatcactcatccattgacaactcgcatagtttattcggtgtgtttaagatttattttattttatgtatatgagtgactgcatgtgtatatgtgcacccatatgggtgcctggtgcatgtggaggtcagaagagggccttggatcccctggaactggagttataaaggattgagagccaccaggtaggtggtaagaaccaaaggtggtcctcagagagaacaacacgagatcttaacctctaagccattgttcagcccatcctatttcctttgatagaaggtcttggtcatctgctgtggtgtacataaaagggaaggtctagaagtaagtggcacttaggaattttgttcagtaagtagttctctgacagctcaaagctgatgcatgatctagccatcatctcctcagaaaaggcaacacaagagacaaaaggcatatgcccattagagtcagacattctgggtctgatctattgttgaggccggccagcggctcacatgtctgggttcgagcctggaaggcatcttggaatctggaagaaaagagggagctaggctgcgcgagaaaggatggaaccaagacattagtctgatcaaggttcaattttactgtttggagacactcggttataaagaagaggggaggggcccattcccgccaaatcatcttcggagtctagttgcaggtgaccacgtgaatactccggaacagctaggcggcaggtagtagcagtgggagtggcagactccacccccgatgatttggtgataacagtcaaacctgatcagccagatttcaggctaaggggggggggggaggttacaatctataacactgttttgtgagttagtttggaaaggcctgcaatgctggctataggaagttatgctaagagtacaccataacattccatgattcctgtcacctcctcttaacaaatttctcctatctaccccgtgtgagccatcttgttaaaggcttgggtttccagaatataattcaatacttaactcatttgagcaagtgttccatgctaggcagtggctggtgttgagaaccgctgcagaagggagagccattcacgttggagggcaggttgccaccctaaccctgtgaactgcacttggatttagccagttatccacagaagagacggtaaagtcaggaggaggtcgtgttaagagagattccagagcagctggtgggggcaatggagcatggaaatgatcgtgcatcattaaatacatgtacaaatttaaaaaaaaagaattgtgtacattctaaaggttcaaagcataaattccagttttacatttgatttctcttttattcagctgacatgctgtttctcattctctccttaaatcagtttgatcttcatggctagtgttcttagggctaataaattctttgaactatacacttcaggtaacatattcttagttaaaggactcctgtaatccccagggtacttcagagaagtcccgagcctatggttgggttaccaacggcagcagatgtcagtgtgatttacagcagcaaaacaggtggctgtctgcagctgtgtccttgtggactctgttcccacacaattagtttctcgtggttttaagagagcgtgtccaggcaacgcctgcttgctaggaacccccatccctcaccttgatctctctcttcaaatcacatctcaaagccacatctgcagcagggctctaggtttgacccccacgcccctttcttcctcctgtctctgatgggcaattctgtccattttatgaatctctggcagggctggctttatggccagttccaaaataccttttaaaggtcccagaaattccaattttctaattaaaaaaaaaaaaagtcactgtttagtagtctccaaaaccatgattacagactcccagctctccgtttctagttttttcaaactgaaaaatgatacttccccagctgacaatttatttcatagcaggatcatatcccagccatgttatgcaataccccccagaaacaagtgacaatatttactgagaaggatccccatgctgaaagcttgttagaaggttgttacgttaacactgtccccggaaagacttgaatgagtgtccccacacacaggcagtcaatgacagcgtaaagactatcagcaagagcaacttggtgaattggtaagtttaactgacgttacttacaggagtttaggtgagaggctaccggcaggagcttgtacaaatgaagcccattgccaaatgcccactccagcacagacgatgcccacaaataccggaacaccgaaactcactgtacaacttgcaggcagctcaacaggatggagtgtcatgtctaaaaattctgttgtttctggttctcttccaggcagctcagcttgtctgaggatgtctcttactccaatataagctttgggaaggagaagcatagtgaatacactcagtttcaggaatttcctaaagattttgagttgttcatcctgagttttaacactttccctacaggatggaggctttcaccttcctctcaaacatcctgagttgtaagaaattgctctctgagatggaagtctttatctcagagaagttgctacagaacaaagggatttgttttgtagagtttgaactctatatataccagagtttgaactcagggcacacgactctaccaactgtgtagtctattttgccatgcagattcacaaaggtgtcagaaaaaaacttgtaatgggatttttttgtttgtttaactatgaccatatgcagacatggtatagaaatattctttctgtcattttagggcataaatggaaaagatggattaccaggtgctcaggtatgaaaaaaattttaaatagtataaattcttaaattttctaatttgtaagtgtatctttaatgctctaccatttaggtcagtcagactaatgattttggcaagcagtattttttgtttttgtttttgtttttaccattgatatctgttttccagggcatcatgggtaaacctggcgacagaggccccaaaggagaacgcgtatgtatatcactactatggttgccgttcacatttcactgatacaactgtctgaccatataccaaagcatgtagacaactttgattctccaaacatgccatgattagggtgtatatgaaacactgtctctactgggcatagaatgtgacctgtaaggaggtcataccacaggtgtgcctgttcgttgtacagacctgagtctacacttctatttcagtttggagagtggtttgctaccttccagagacacacttgccagctctaactaccacgcagatcctttttgccatctatgggatttctcacccacagagctactgctacttagagtttcatgcatttgtttactacttcgacgtttggttgtcttgtacattagagaggccttattggcatctacccacttgatacagtagcaccatcatctctccaactgtcattattcaaagcatctttagacatcactaaatgccttctagtgggcaaaactgcccaggctaagaaccactgacccacttactccactgacccccttattccacagacccagttactccactgacccagttactccactgacccccttattccactgacccccttattccactgacccagttactccactgacccccatattccattgactcacttactccattgacccccttattccacagacacagttactccacagacccagttactccactgacccccatattccattgactcacttactccattgacccgagtggtatctgcactttcactacaactctatgtgatgctgttgctgtcactaaaacttactagtattttctgtaatgaatcttatttttctagtaggactcatgttcctgaagccaagactttacttggcataagcctatttagggacattcttatgtaagtggctgcagatgtgtttgtgtactggtgtcttattcattaaggcttctttttattgttacatgagaaattcatgataatcgaatgacttataaaaaaaacaaaatagcacacgtttaagaagaaaaagtcttccaggcatctttacacagggataaatacttgatacttcaggcatatttcactcttccactcttacctacaatcaatatcaaatatatatgattttaaaattagattgacagtgttttgaaaatgtttgttctactggcagtcttcaatggctgttcacatcttcccaagtccctattctctaagcagttattttcctctccagttttttaaaacatcctttttcaggtgtgtgtgtgtgtgtgtgtgtgtgtgtgtgtgtgtgtgtgtgtgtgtgtgtatgcacacacatgggccacagcatgcttgtggaggtcagaggataacctatgtgggtcagttctctccctccaccatgtggcttgtgtggattaaatccaggacatcaactatagtggcaggtgctatgtgcaatttcaggcctgaaaagataataggtgatggataccagctcagctatctcgccaggccatagacacataatgttaaggtttcactatgatcatggaatacagatcatagattcaggtgtactaatatttttaatcttgcatatttttccaagcacgagctgcctgtatatcaataagaccagcattggtattttggccatccattttctttcttcctagcgtctgtgtcaccttctatatcttatgatcacattaatatctatgagtgttcatttattttcactattttgttaaatcaagacaaatacaggcaggcttttcagagaccagtaaggttaagggaatattatgtaaattccagaccccctctaacaccagcccatcacactcagccgagacctcacttcccgagtcatgtgactgaacactgaaaacgtgtgactgaaccacttgctatggtatcacagtggtatatgtttctcttcactggttccatatggaaacccatgtaaactatgactacagaagaaaccccaaaggaccttatgagtgccaagtgaaaatgcaaaaggagagacagccataggattcagaacaggttttgagtttttctaggtgaaaaacttctgttggtcatctccttttacaactacagaagagacccagacctgacatggcagtgggtgcggactttcaaaagtgacatcactctagactgaatgaagacaactgttgtggtcactaggatctatatgctgagtgattccgaggggtcattgtttgaagcattttacttgggtatattaacctctcggcattcccctagctaaaagatattatgaatattaatattcccacatgctaatggtacaagttggggtacagaatggaagtatgtaacccgaggatccacagtaaatggatgccaggatgaatcctagacttttgctcttcaccgcagctgaggcattgctggaagaggtgattccttacttctctccccaaacagggtgatcagggaattccaggagacagaggccctcaaggtgaacgtgggaagccaggtcttacgggcatgaagggggctataggccctgtgggaccagcaggaagcaagggctccactgggccacctggccaccaaggccctccaggcaatcctggcatccctggcactccggtaagtggagcccctggcttatactgaccatgggcgtttttaataatgaaataaattatggccattttgaagtatataaaataagctggtctgcgccattatttgaaagtatatgccaggtcctctgttgacacctccctacgttttagatcttcacagccaacctggaagactagaatccttttccttgtgtgtttataaatgcagaagcgcaatgccttgatcaagatcaaagaattagtaagagagaaaaatccagatctggctgactccaaaatcagtttgtttcggtttgatgcacaggtttgggtttgtttagtgtgactgggggaggggtggtatttgaggtgggatcctctggcctcagcctcccaagtgctggggtgacaggtatgtaccacccacacatgccccaaaccatgctcttacaattctgtctgtagttgctcctcatacaaatataaacttctatttcacactgagactctattcagttggtccctgaacaaatctgccctaaaggaggaattaaagcaaaagtgtgatcagagcagcccttatctcactgatatttcagggagattgatcaatacgaggccattcacctgaggagtatagtttgaaaacctctgtgacaggaacaaaggaggatcctggattaagtaggagaggtaaagaccgtctctctctctctctctctnnnnnnnnnnnnnnnnnnnnnnnnnnnnnnnnnnnnnnnnnnnnnnnnnnnnnnnnnnnnnnnnnnnnnnnnnnnnnnnnnnnnnnnnnnnnnnnnnnnnnnnnnnttacctcattgctaaatggttcctgcagaaaacctgcaaaacttaactatctgtttctaccaaaatcactcaattttctctctctctctctctctctctctctctctctctctctctctctctctcacacacacacacacacacacacacacacacacacacaaagtaaaataaatacaaataagaaacaaaaaaaaaaaaccaagaaacaaaattccacaaaaactaaaatcaaaacagtcaaaaaaaaccaagaagaagacaaaaagatgcccaaacaaaataagaaatccacaaaaataccactgagtttgttttgtactggacaattacatctggacacagggcttgcccttacatgtggttttgttgtgacactctactccgttagagagaatcgattcttccctttgccaacaggcatcaactgcaaatagctagagtcttggttaggggtggggcctgtgtccacttccctcttggtcccttcatcttcatccaagttcattttccccatgcacatctgaaacaacgtaacagctctaagaattcagcaccttatgagcacattgagtgaattgtcttttttcttttttgcatttctaaatgaacggatttttgtgaatggagaagctcaccatatgatcagcccattcacaggcttaacatacaaacatgaggaaggactctgtagatagaaaagatgggaaactcaccaaaacagggacttttaaagattaagcacaactgcctggtttatgggaatgacagggaccatggctgaaagtcacattgcatggagattttccactgatctttccagctcctcatctggtcacatcccactgggctttgttaagagtgtgattggcagtagacatggtctctgcattacaacttctagtgagctccatagtgtcttctctgccatccatggagctgaatacatgaatacaaagaatggtgacaaaatactttgaaatcctggccatcatgagaccattagctcctctttgaaaatatcaattaagcatggctattatgaatgttgggtttttatcaatgggttaaccattcagccactactacttacctacttacagttaccaggtatctcaggcattttctactaaacatggttattatatttatgttactatctaagttatgagacaggcaaacatggggaaaacattttataggataatcctacgatccagcactccatttggggttttcttcctttggagacacatgatgtcacttgctatagtcttcactaggaaccaagagtggatgtttaatggttattgcttggtaacaccgtggcattgcttgtgccttttaactgtatgcaataaagtaacagaaaccattatcttctagttatctatagccacatttctccactcataggagaaatgttagcttcactggttataatcccagcccacagcttgtaaagcaactatgatcttcagcttatcctagcatgtgctctaagaaggtatttactgcccaaaatagcacactgccagaagcatttcacttgacaaacatatatgcacaaaagtatgccaaccccatctctgtgccttatccactgtgcgctgccctgttttaacacacattctttttcttcctgtaggctgatgctgtttcatttgaagaaataaaacactacattaatcaagaagtcctaaggatttttgaaggtcaggtttgctttataatacttctggattttttacttcccatccccctgtggggaatcccttcagtgacattcttgaactgtgacagcaatcttagcagattatccgtttcctggaggggcagctcctgttgacagtacacttaagttaaattttctgtttaaactgtctttccgtgtcgcttgtgaataagacaacacaggtaaagtaccttctgtttatgtaaccacctttcaaatatttcagcacccatcggtctcgatcttaatttccctatagagtaagtacatctagctcccccatccctgacaccctggggagatgctggattgatcaatgagtgttttaactgaggtgggttacagtgtcttttgatctagaccagggtcagcaaacaaaaactaccagccacatctgtctcctaaaggcagacttttatgtgacccacagctgggaatggttctcacatacgtacgttaaagggtttcccacctgaaatccagatctccagtcatgtgttttgggtacagtcatgctcacttcttctcatccttctccacagcaaggcaaaggtgaaaaggtgaatagatgtggcagacttcctgtagctagcaaagaattaagtattcattatctgactcttttcagatagcccagttctgcatgtttaagcccaaaataacactgttttaaaaacaaaacaaaacagcatcttatatccctcactggtcttgaattcttcatgtagcccaaggatggccttgaactcctgatgtttcttcctctaccttgccagtgctgaggctgcaggcatgcaccaccatggctgggtcattaatgtcttgctggggctgaaacctagggctacatgcatgatagcaagcactctgccatctgagccgcatcccagcccatcattgctttttctaagcagttaagtcttgctgataactccttctgagtcatcgtttaacagcattgttcttccctctgaaaagtttgtaaaagtcaagagtttctcattattatctttaaaatcttaaacaggtgaactcatgtttactatggtaaaatctcaagtgacttcggtaatatagcactaaatgcctctagtctaaggtcctagtcttgacttccagcaacaaaaatatatttttaattacattaaattaataaacaaaattcaagtgtttatgttctgacatggtccaacctgaacatagtctctggtgagaagtctggtgtaattctaataggtcagcctttatatgttacttgacctttttcccttaatgcttttaatattctgtctttatttagtgcatttgttgttctgattattatgtgtcgtgaggaatgtcttttctggtccagtttatttggagttctgtaggcttcttgtatgttcatgggcatctctttctttaggttagcaaagttttcttctataattttgttgaagatatttactggctctttaagttgaaaattttccttctcatctactcctattatccttaagtttggtcttctcatcatgtcctggatttcctggatgttttgagttaggacctttttgcattttgcattttctttgactgttgtgtccatgttctctatggaatcttctgcacctgagattctctcttccatctcttgtattctgttgctgatgctcgcatctatggttcctgatttctttcctagggtttctatctccagagttgtctccctttgggttttctttattgtttctacttccatttttttagattttggatgttttttttttcaattccatcacctgtttggttgtgttttcctgtaattctttacgggatttttgtgtttcctctttaaggacttctacctgtttagcagtgttttcctgtaatactttaaggggtttttgtgcttcctctttaaggccttctacctgtttagccatgttctcctgtttttctttaagtgagttattaatgtccttcttaaaatcctctaccaacatcatgagatatgattttaaatctgaatcttgcttttcgggtttgttggggtatccaggactcactgtggagggagtgctgggttctgatgatgctgagtggtcttggtttctattagtaagattgttacgtttgccttttgccacctggtaatctctgtccttagttgttacagctgtctctgggtagagctcgtttctcctgtgattctgttagcctctgtcagcactcctgggactccaactctctcctgagtcccagtggtcagagcactctctgaggacaagtgtgcagaggtctggagctcagctctgcctcctggctgaagatgaaggcctgaatggggaccctgtcccagaagctatgttgcttctgcctcccgcgtgctcttctgcggagactggtgtcccaacatgtgtatctttagttgcctgtaaccacacaaagaaaaacagcaggagatacacattttttttgcattgaaatctaaaaaatcctcatctcacttttaatatttacaggtgctgctgtcaatgataaccctttatctcaggaacgaggttctgaacgcaatttcttaaagatccttgctatcaccctatttaggagttcagaaatagtcaggcagtggtggcacaagcctttactcccagcacttgggaggcagaggcagacagatctctgtgagtttagccaacctggtctacagagagagttccaagacagccaaggccacacagagcaaccctgtctcaagaaaagaaaaatagttcagtagttagaccagcatctggaggctaattggtaatcacagaaaccgggctggagagatgtcccagtggttaagagtatacgtttgatcctcagcctctacatccaagtgctcaaaagcatccttaattccagcctcagagggtcagattctcttttcctgactccaaggacaccagttctcacactctctactggccacgtacacacataatttcaaaatgaggatcattaaaaaaaaaaagtgccagaaactataacctcatgttatcagaaaaagaaaaaaaaaatgacatgttgagacacatctggcaacaattttcaaggttctgttcacactgtaaaggtgtggcccatgacatccttttctgtgcagtcagccaaggaagcgcccagttcttaaccctcgaagaagactccagactgccccagctagccactctgtagctactttcatgaaaggctgtgggtctcctccagagagtcagggaattggttctggcaaattcacctaacttctaagtagctcagcctttaagcctgttgttctttccctttggatttctgctcaaccactgagtcgccccagccaggaagctgacatctatggagtcatccccatgtctcctctggcttcgccgccatctcctgctgcctctcacctagagttctagtgaatggcaagacactctgccctctggagaacttgtctacctcgaaagccacagatagcctagtctcaagatacttttctcaagagacccaatagaaatcactttcactttaaacttttaaactctaattccacgtgtgatgttccctctcctaatggatctcctgacaccagcctggcagatctgtcttcatccccacacaacgtacctgaaacctacagtgtagttatttggcacttaaactaatttgccctcaaatcattttcagtcagtccatttgatttttttttccactcagaaatcacccttgctgtggcttctgaacaccattttccaagaataaaaaagcagtgctccattttcacaaatcatactgttgcaaggtcagtttccttctccataaacggggagattaattgtcacattttaaagcagtttcagcaaaatagcgcagtacagttaagtgctgggtttcagtcacggccgtctacagcgtgttccttagaggtttcactaaagaagctatcagtaagtacccctgctgtctccccacactcttcttcatgttcagaacctcaggaaggtcctccctcatcaacaggcgcccaagcatgtcctcgggagctcccagttggtcactgtcccaggtgttcactcagatggctcctcttgtgaaactctaagccaggattcatgttttcagttctcctccagggattcatcagttctctttgaacttctaaggtgaccctcgcagaactctcaccttgagctatcctccagaccactaccctgtccttcagcaagctaaatgcaccttcccaaacctgacaaatggagggaagcaattctccatgatctcatctgggttccaggtggatcacaatgcacaagcatgcattcctttcactctaaagttagatcaaatccccactttgattggccattatgtcgccctttttgcaagcaaggtagtaacgtagagcagagatgggtgctatccagaagactcagcttagcatcttttgtccttatgagggcatagcagttgacaagaatactatccacataagtcaggagcttaccatatcagagaagtgtaggttttgctgtgacctcaccctacaatacttgagcatttgtatatctatggaataaaagttatgatgtagtatatagaaactatcagcctctttccattctttaaacccccaaagccagacctgcatctgagggaaaagagaaaagttagggttatttttgcttttggatttccagtgttcaggaatcctgtgttttctccatttttacatatatttcatataatgtatatgaatgaacatattatcctattcaatttcaaggtaacgtgtctttcctctctataatagctacaatatttataagtgtgtgtatacttgtgcacatacgtagcaaccagtagatacacatcctgggagatacagttcatgctgtccacagcatagtgtggtttttccatttgctgcttctgtttgtctgagactcacacagaatcggtcacatggcttacaggactccctctatctccaataacctgtggttgtctgctcatacagaaggacaggtgctgaagcctactgaatgtagaacttgccaactgtggttttcccgtagggtagctagctgggcattctaaatgaaaatctttccatttcggtacccttaagtctatcttgtggggatatttatttattaatttatttattatactgttaaagccagaatctcactgaagtctggggctgtcaatgcagagatagtctttctcccctttattcattttacgttttgattaaaatataattatctcactttcccttccccttttcagaaagggaatctttggttgctgggctggctggggaagaccctgactagttgtttaaagaaagacaaacaccccattggctatctgatcctcagcttccaaaatgttgctgctactttctcctttcagggtcctctcattcttgagttttatgactttacatgtttcctggtagtttttcaagtatccacaagagaattaaagcagatgtgtgggttcaaactactatctttacccataacatttcaaaccaacatgcttacaaaggctgtggatggatttagtattatgaactacaaaataaatgagtccataatgttattaaaaattaaaacaaacctggggaataattcagatctcacaaaaacttacggttacattgccccataggagaaaacctacatataaatttagtcatgtgggaaagccatgggaaattatccaaaaaagtgatttccaaaacaggttatttaccctgtgagtgaattttattttcactttaaggctaagagataacaatattattaagtaatgagtacttcacttgagaaatacatcatatagccaacggttccataatggaagatcagaagaaaaggagataatgttttactaagaaagtggacaattaaacatgaatagacattaggagaaaaggttatttttctttaaaaaaaaaaaaaaaaagaagggttatttttctttgaaaaacaaagttacaaatttgatttgtaagacagcaggcaggggagagccaggtgacacctgaatgtctcttacttcttcaatattcatgtcttcattgtcgtgaggtcgttctcccaagaaccaagtcagtctcgcctatcacacagctggctctcattttggcctcttctaacgtctttaatcttctgcttcgttagaaagcagagccaaaaaaactgtttaaatgactgaggggctctgaaaacagagggaaggcgattaagaatacaggccttcagaattcatttagatgctcagaaactattattttcaattatagtgcattagggtaaggctcagaagaggtaattagcttatgctaaatatttgtttcttggtgtagcttaaagccagttcatttacagctagtagtaattctttaaaataattgtattttactaaaattattgtttaacccccccccaaaaaagtacttgtaaattcatttcatagcttaagaggaaaaattagaatggtgactatttctgtttaggcatttaaggtagtaggcgtgtttcaaaccatttatttattggtatgtgttcatgagcacatctacgtgtgttggcacatgtgccatcacatgtgtggaggccggaataaaatttgtaggagtcagttccttcttctaccatgtgtatcacagggattcaactcaagcgctcaggattagcaccaagcatccgagacagctgagccatcgcagctgcaagttagctttccaaattacccttgaactactaagatagtttgtctttggaaaaaattgcgtggtgaagagaaacattagcaactttgtttcttcttttcatagcaagactgtacctattctagtttctctattttaaaatcaatcatccatatatgagacttttacaatgtcaatgtataaaatataaccaaagcaagtttaaggggcccggtggcagattttatttataagtgaattcatgatgttgtcaaaacggattccagattaaaatactaagtattctcttgagatgaaatttaacggagtaatgctctatgtgacattaataaccaacaattcagtgtgacaagaactgtcatgcagcacctgacagatttctagtctttttgtctcagactattccaaaacagctgaaggtgctctgtggatatgcctcataatatatgtgcctataaaaacatgagttcttacttaaatgatgtttaaatattaaattctttgattctggtacaatagttggtgagaaagcccacaatccctaatccaaggtcttgcttcaaagaatgtttagtcaggtatggtagaggcccaactagagggccaggagttcaaggccagcctgaagagaccctgcaagagaccctgattttttttttaagtaattaaaaataaaatcaagcatgttttgttcagttagttagtaatatacccatttcagaagttaattttaaattgaaaattcttattcatggtttcatacttagagtctttgaacttctctgttgtatagttcttttaagtttcattaacacaccaactttctcatgcctttgtttttgtgtgaaggggtgctgtatgcagggtaggggttggttggaatatgtcccatgtggccaagtacatccacagaggctacacaggatgttgaatttcctcctctattatccccaccatcttcccttgtgacatggcctctcttggaacctagattttgctttcctgctaggttgatgatcactaagagtccctgtgatctttctgtctctgatctcctcagcactggggttgcagaggcacacaaaccctcacagcttttacatgagtgctaggaatttgaacttgagtccctatacttggcagcaatcacccttatccactgaataagccccaagatgctaactttcctcattgcaatcttcctctcatctcaatgtatcatgccattaatcactgtctgagacttagtagttgcatcctgctataccaactatacagttgttttcatgagcggatgataaacccctaagagggtctgttcagttaattattctctgtcatctatgggtacttttgccaggatgcctatatacggttttgtgttccaggcagtttgttaaatgcataaacgggaaagcatcctgtgttaggaagtacttaatttataaaggcgtatcactcgatgcttaacaaaaccatggcatatatttatttacctgctcttcctaacaacacagataatgtgttcatttcctgtgatttgtcttctccattccaatgttttcttgggctcacagagacatgcattttatcgtttttactgctgccattacattcaaagggcggtatctcatctgcagcaatgatgcatctcctttccttttaccatagtcattctcctaacgacctgattgaataggggacacaccagctggacatacaaccagaaaatgcataataatgggggaatatagaattcctcctttaaaaagtaaaagtaaaatgacagcttttcagtgactaaatgtctctgtgggaaaggcagtattgtttacatcatctgttgacatgtaagaaaatgcaatccctacacacgttagggagtcggaagggtcaacaacttgaagctttgcttagtcattttcttcagcctctaaatctggggtgaggtcacagaaaggaccccagtcagctgcaaccatttcagtacttgactagggggaaagggtagacatctgtaagctcacaagcatccctgtacagggcagcatgttgaatgtccccactgcatactccttgccaatgggcttcctcgggggttaccagatgggcagcagccagagagctcctttatgaccactgcgacacactgcccattctgctttttctctttcataagaaatataaatctagtcatcactcaaaatacaggggtcgggttctcaccagggaagtgagcattaaagaacctgtgaatatgcttaaaattgctacacatatatggatagaaaataccttgcatttgttcttaaaacaattcttaaatttttctccacgagtcataactgaaagttgattagacacgtgttctgcactgctgggttccaggaccactggtaactcctcgaccctctgaacaacccagatcttctgcttctctttaaacaactccatgcagtttattctatatattttatcaaaaaaaaaaaagaagaagaagaagaagaagaagaagaagacaacaggcagaccagttgatatagaatatgtgcttcagttaaaaattgattttttttcagctttgtgttaaaaggtttggaaatgctttgacataaagactcttccatcacatgatgtattttttttctttcgtaaatgaagagaggatggctgtgtttctatcccagcttaaactgccagcagcaatgttgtctgctcaagctcatggaaggcctggcccaccagggaaggacgggttacctggacccccaggagatccagggccccaaggtaaggctgaaaatgtaatacgtgcttgcatagtcctcaatatttatagctgcaactaaaacatatatatatatatatatatatatatatatatatatatatatatatatggtgtgtataaaatggcttgttgtggactgtcttgttaataatttattttctaatgataaatattaattattactacttcaaatttaaaatggatatacctgctgttctaagttcattttaatgatatccagagtaaccataatactgtctgcttctctgtcattgtcacagaggaatcctagagttgtttctgtggccatcttactgttatgtgagattcctcatctgagagccctaaagaaactggaaaacaatagccttgggagacactgctacaaatagtcattggggctaacacctaattggggaagtttagactgatgctatagtagagttttactgatagtgacttttaaagtataaatgtaatcttttgtttttatttctgagaatttcatacctgtatacagtgcaatattatcatatctgctcacttcccccatttaagtattccatgccccctcaacatgggtcctcccaaatccctctctttaaaaataaaatgaaataagtcactaagtccagtcggtgctgccatacgcacacaggtgtagtgcatccagtggttacactggaacatggaaggcctactaagtagccacttcctccattaagagtaagttctccttccccagcaagataccactgcccctagttcccatataaggtatggggcctgggggcaatctacaccttctttgtcagaatctttggatagcttaatcttggtaaggtcttgggcagataaccacaatgtcctttgaactttaaagggtactttgtgtgacttgtaaagacttcaaatccaaacttatgttggcaaagaaaaaaaattggccacttatgacacctggagaagacaaatgctcttgagttttgcttgattcggttattctgacacagctgttctgtaaaaaaatatggttagccatctgcatactgactagatagacctgtgtttagatgattcatgaattctgacagagaaatgccaaatttagtgaatatgaatcataaaaataaggttagagaagctacagccacaggcacccttgctcccaccaaagttattcctaagcattctgggaagtttaccttgttggagttgaattaaattctactcaagaatccattttaataaccatctgtgcatgggatccacttgaggacagacagtgcatccccattcccacgttcccaattcttataatttctgccagtgtgcaatggttggaattctaagggtttttcagaggatatataaatgctagatcctcaacagagagaactgtttggtgggtgggtgcttttggttgtggtttgttgcagtttgttaggtagtcatgcatgaagagatgagaaaaagaagttagatatccggactgtgatcaaacttgcccccaaggagctcaatgcccctcttcagcaggaaatagcctaacaatattgtcattcccttcaatctgttttttctctcctgcctaacattagggggttgatagggtaggagaagatgggtagagaaggtgtgtgcagaaggtgcgtgtatacacccgtgcagaaggtgtgtgtatacacccgtgcagaaggtgtgtatatacacctgtgcagaaggtgcatgtatacacctgtgcagaaggtgtgtgtatacacctgtgcaggtgtgtgtatacgcccgtgcagaaggtgcgtgtatacacccgtgcagaaggtgcatgtatacacccgttcagaaggtgtgtgtatacacctgtgcaggtgtgtgtatacgcccgtgcagaaggtgcgtgtatacacccgtgcagaaggtgcatgtatacacccgtgcagaaggtgcttattaccttttattcattggatctcctctgaagtcagggggcctgagaactggaaaggcctttaaaagccatctgaagatgtgacgctctaaccacatgaagaataagccctgctgattcaagtaaaaaaacgatggatggatccttcagatctcagtagtccaagagaatacacaaaatgcaaagttgcagtgacgtggtaaaacagagtttagagcagagtcaccttcccacataagcccctagctccaggtatcatcccaagccttggaggtccatcacaaaggttctcagtcagaggcaataccaagtcaacaatattagtgaggtctttgaaaaacaaggtttatatttgctactgagtcaactgatcaaaacatgaccttcccccctttgcaatggatttctgtggggttaacccactgctatgtgtgcaatacagactattgtttataagagagatctgaggtgtgattcttaagtttgaaggaattctccacatggtttccagttttcttaaaacaagttctactaaaatagacaaaatgtcccaccagagtatctgacaacaggcatacttagaagtggctgcctcagcctttagcttcccccatgggacttctaacagtgaatatatcttgactacaagccgttgattgacacttctactccttataatgttaaagttttcagaaacacagcagaaaatcaggtttacaaaaaaaatgagattcatattaaaagaattttgcctatagtcatactgtactggtaaccctaaaaccacaaagaaatctcatgggagaagagaaagaagaagggtgggaggagaagggaaagaaaggagaggagagaagagggagaggaggtaaaggggggaggaggaggaagagagggggaagtaggagcagcaggcgagaaagtggcggctatgttggatttttgctacttttctgggtgggcattcaaaatggaagggttttctctggtaataagtaaatactaagttctcagaggatgaagccatatgtgtgattccgatgctcttctctctcctatttaaaaagaaggaagaaaacatccattcagcctcaagtgcgcttggctggattagccctctttatctggcccacacaattgagtttgacaaaagggtgaaacgcaaaccacagcccagacaggggcaggaaatgtgcctgctgcactgttccagggtacactggccacttggacactgtgtctgctgggagcccatctaaaagatgagtgggtttttaatagtacctgtcaggaaagaaatccattttaatttaaactaagtggcaatttgaaatatgcaccaggaaaggggtctttttatcaccttcattctctttatatgtttaaggaaggattttaaaaaaaatcaccaaccttgtaaagtgtcctgtgtttattctgcaaagcaggacattgtaaagacaagggaggatttgatgtgaggccatcagaaatgtgcccaagggagggctgttctcctacaaagacttactaatgaaaaatggtggatattcttccaataaccccatcttctgaaaggacagtgagtgcttattagggaagattctaaggaggccattttgtttgcatccttccagactcccaagagagtgatgactgatgtcttactaaagtccaaagcatttctatagaacttttatctcagccctcatgctaggctgtgactgtgaacttcccactgtgcagagagaaagcactgcccagtgagcttttgcagaagagtttttataaaatgtagttgatgttttcaaaaaagaattgacggaaatcttgagaaatggatgccacatgtataaaccccggtcatttcagaaaaaacaaaaaaaaacaaacccacaggtagacttaatagatgaaaacaaggaagaggagggaaatggggagagatgaggatgaggaaggagaggaggagggggagggggagactacatacacaccattgattttaatagaacatactgggagtcactgttcttctttttgagtttttaaagttcagatatcatcagcttctaaatccaggaaaactttttttttttttaaatccagtgacccatgggatagttgatagttcttggatagttctgacctgtccaaaagaaaaaagaaaaaaacttagcagttgaccgcccttgaaaatgggacatgattgtaagtcaagatggccaaagggttcagcagccagttagtggagcaagacaagggaagctaaacacactctgtgtgtatgtgtgtgtgtgtgtgtgtgtgtgtgtatgtgcatgtgtgtgtgtatgtgcatgtatgcatgtgtgtgtgtctgtgtgcatgtgtgtatgtgtgcctctgtgtgtgcctgtgtgtgtgtgtgtgtgtgtgtgtgtgtgtgtgtgtgtgtgtgtgtgnnnnnnnnnnnnnnnnnnnnnnnnnnnnnnnnnnntgtgtgtgtgtgtgcgtgtgtgcctgtgcatgtgcgtatagggtatggccatacgaatgcaatgccggcagaagctaaaactgtttctgagttcatgccgataatgctgcttctccactcaccatatattaactatccagttcacatttatcatacattaaacatgaatacgaggttgggcacagtaaagcacagagaatcttacagatacacagtgatagattaaagtcttagcaagccaagctttagtgagatattgccactacacatagtacttaaatgcactattcatatcttcatatcttctcttatatgtttatgatagatgtgtgagccttcttcaacagaaattccgacgggggtctaggtacatgtaatggggaaggcacacacagaaagaattttgttgtgtatgagaacagagagcatatggatacaggctttagtgtaataattaaatgaattaaatagttaataaataactaattaaataaagtaaaggagcaagcaactcataatctcaatatcagcagaacacaaatttgagtcaaatcagtttaagataaaagcaaaaaaggctttcctatgacatttaaatgctaaggaccagacattttagctatgctgtgagagaagagttcgagaaattctcaaggtacttaagatgtatttttttcaagttcgacttttattatttaaaaaaaataaataaatctcactatcaaaatcgcggtttgttttaacataatgcataattgccaggttctccatgttttatcacgctcaagctacatttgtgtttaatgcataaatgtgagataaatcctaattcatgatgagtaaagaaatagcgttaacagcaggactcgggaagcagtcctttcatgcgcatcagtgcggtacacgcctcctttcacgcctccttttctatctgtctctcatccaggctaccgaggacagaagggagaaagaggtgaacctggaattgggctgccggggagtccgggtcttcctggatcttcaggtaatagacttattatctctatgcaaacagttctctcagaatgggccttttctcccctgtggacctcatgtgttcagctgaaggagagagggaggcaggcgggatcgcatgtgacccaatttctcatggtctgttttatttcctcagcagtgggtttgccgggctcaccaggtgccccggggcctcaaggacccccgggacccagtggaagatgtaatccagaagattgcctctatcctgcacctcctccccaccagcaggcaggcgggaagtgaaaaagacggaggaagacatcgcgtctagtgctatctccaggccacttgagccgccactgcaggcttcacaaccacgtgctctcaaggcttatgagtttttggactgctttattttagttttctgatacagaagcagacatccaaagcaaccatctgagtcctattctgacagtaagagcagatccgtattttcagatgtttgccaacttctttccatatgttctgtttcattgtggctctgagttctacggcttcggaagaaaaatgcaagcgagcctgtcatgggctcttcagaaaaaatcacgtgagacgatttggtacacagacgacacagaccttgtgaactcgtcaacgtgactaggttttgattcctgaattttaacttttctaatttatcttgattattttgttcatatttaaatttactatcgttactttagtttttctttctgctcttttgagattgaagtagtacattactgctgttgactgtcttaggactgatttttacaagaagtcctatactgtcctacattcattcgatttatgcagaaaaaaatatgcaataagagattcgcttctaacttattaaaaacaaaactatgtgagactgtttatcaagaagcccccaaactcatcatagccaacatgcttttggctttttttggagcacgcctcactgacacgaacacatgctacatttaaaaaaaaaaaaaaaaaaatgaagaatcaacttgaccctatacccaagtctgtgagtctccgatggtgaactaaaagtggtttgtcttctcgaagccattcttggtggtaaaggcgccatgctgtctttggtacctgacaggttttagcagcctagcaagacctttgtgcttctttatgcattcttttttctgactttatgatccccaggcccgacccgccatcagagaaaagcacaggatttgtaatgacgcagaaaagaggagtcctcgtcttggaaactgagagcggagggtcagcaaaggcatgttgagtgagtgaagccctcgtgctcttaagaagattaatgttttctcagaaaccatcgaaaggtccagctcagcagaggaaagccaagagacttcacccgaaagtcactacgagcttcaaaaccgcgtgctcggggttagggatttgacttcgcagtggagagcttgcctagcaagcagcgtggccttgggttccgtcctcagccccgaaggaaagaaacaaacttgctctgaaaggaagcaaaatcccagtggtcttggctgaatgtctttttactccctacctgttcattgcttggagaaaccttgggtggggaaaactgatttgctagaatactgagcacaaggtacaagggctttgctgatagttagctggtgggtaccactgacgctgagagcatgccaccagagcccttcagtcccatgcctctaagagctcaggattagaggggatgattttggtctgttcattgaaaaaagacaatgggtatagaaaagcaacccactgaaagtgggaaaagctgtgaacagtgttttcctgagaagcatgcctgacataaggcagcgtttgtttaaatgcacccatgatttgaactggttttcattataaacagatgagctgctggcccggtactgtcaacatggctgtgcataaaataaccttttaggtatttcatattgagttttgctgtatatttcaatccaagtttatttattttccaagtctactttatttatttccactgttttgggcttgaaattgcttattcctttgttttcttttgtattcaatacctacaatggtgctctgttttaaacttgcacaattggagtatgcaaatgtttgcttatgtatcttcatagccaactgataatctaccccctaaatgtatataaggtgaaaagttggtgctatgtgtatattttgagcttctaatttgttgaattttctgaaaacatacactttacctgacatattaatttacttgaatttgctgtatagcaaagacttttctatgttttcaaagattatttttcatattaattgacaggttatttatccttttgcattttggattattcaaaaatatttattttgtaattttaatattttcacggacatttggctggtggtgggcgattagtgtatttgggtgtttgggtttttttgtttgtttttttgttttttggttttttttttttttttggttgatcaattgatatgatgcaactcattttcttgttttgcaaattatatttacttcagttccacagaacagaattctttcttacaaattggatggttcttactcctcctttttctaatttttgtgactgtgtgactggcttatccctgtttcaaggatttagatttgtccccatggcttgaggagtctgtcacagtgattcaagctcatttttagagcttgggacatgtgactgaatctgacataaccagagagatgggactgggttatacagctcaaaccatcaatctactgttattaatcttcagattttcttttcttctgccttggctctatttgtaacaaaaggctttaaggagcacttggtcaggctaacacaacaaagaaattggcaggttctcagccccttcgtaaaaacgaacaggataatttggtccccaaagcaggataaggaatatcccactaactaaccatttgttcctggtattgtttatagcaaaggaaaagaattatcgattttctctcattttgtacttcagatatgctttaaatacaaaataattacaggccaaagtggcaatgttaaaactgttttttttttttccataaacaaggatgtctgaattcaagtcctaaattatgccagttcagttagcaatttttggtagaattttcttatgtagagaagatctgtcctccattaagatctgctttgcttttagaatctaaagaaagagaatatatgtgtgcattgttcctcccagctgaaaacatcggctattactcctaaccacagtggaagtcagtcttaagttcttcaacttcttaccttaaccagagctgtgcaatcacttcaaccttgtgtggtcccccccccccacacacacacacacactttggaaaattaaacctttgcctacttatagagattaaggaattattttatgatatactgcctaaattctagtttaatgctcagcttataaagtaatttccatgactatgtcttagacattaattatagtttagctcttctgcagcttctcccacttcagagaagcttatgatatacctcctattgtccacaagatggtgtctgaggcaatttgttcagaactgaacacagattcacagaagcctagaacctggaaaagtctggtgaacaattcagtcacacattggcctttgcactttatttttggaaatattctttgtaaattatatttcattttactaattagtatttttacaaattttcagtatctttgtaaagcaggcacaataacttttggtttgttgatttttttcacttgtatttattgactgtgtgtatacccatacttgtatgaaaatctgctataaggttgtcttatgctactattgtattttagtgactaatgatcacacaccggcacacaactgcattcatcctcccatgcacacaaagcagatactcttttgacaaatgaaaacacttagcttaccacaagaagtagacaatgtatactgcatgatgtctaaactcttaactgcactagataaatttgtacagggtctattttcctagaaacatggcactatttaacaatggttttcagaattccatctttttcttttaatgccatcttttttccagtgttggtaattctatccaagacagaagtaagtccagtgatgctgaggctgtctgaatgacctttgaatgacctttgaatgacctttgcatgacctttggaagagctgagcagagttgacctttgcccttgttctgagttacttttcctacttgttatctgcatctactttgtaaagattcatggtgttttctatcctggctacatagcagggactacactccccaccctggcccttttactcctcttctcccagagattgaccagacctctatgaggagattcctagcagaatttaattattaaccctttaagtcatgtgcatcaatgtcaagtcgatcataggcattcattcgtcagccagtaggtatagtagcatttgttgtgttcaatttgttcaatgaagaggacttacaggaatcaggaaaagaggttatctgtgtttctatttattaatgtagttggagctatcatggtaacatttcactgagcaaaatcatatagaaaatttcatcattttggttgaattgacctcagctccaagaggacacagggaacactagggcagataagtagacccagcaagaaaaaaaattatccaaaagatgatacaaagctaggaacatctacatggaaaaactttcaagattaattccagtagtgctttgtggtagaactcaagaagtgaacttcttgcttcagcaatgtaggcatcactaaactcaggaataacaacttaaaatttaactcaagtctggtgttggcttgaccataataaacttacgagcatcttaaactaaagatgcaattttacaactttttattttgctgtggtacttaaggagttttgggagaataaatactttgggtgaatttaaattccgattgtgttacagaataactacttattttaaaaataatatttggggggtgtatttttatccattttgtttgttcactatcttacctcatcatctacttaaggtttaattttattacacttatgttaagtggagtgctactccgtttattaaaaaccctggtgaatctatgcttgcaggcattgcctcctctagctttattatgtgcagtgaacatgtttcctctctcagcaataaaggagtcgactataaatcagggaactccaaggtgcgattcttagcactgtgtctacactttagcccttctcagcagccgaagcgggagaacaattctattctgctaagtcttagccacactgaagaaacttcataatcagtctcacgccaggagcaaacccacagcatccagggaacctgagactgctctattccaagtactcacagtttgaacttataacctacctccctggcagctcatgaaaagaccagtatattgatttcagatgagaattataaacaacaccaacagccagagggagcccaaaatgatgctctcttctagcagagactaaaatcaatttagactctttgctggagagaactcgaagaaagctaagaagcatcacaagtaattgtccccttttaataagtttgtcagtgtgtcaataagtatttaaatgcacactgtgttttctaacagaaattaattatgataaaataggccagtggctttgtgtgtctctatggattagctaatgacttaaacagttcttgactgttcttaccttcatatttcctcatgataaattaagtaggtgctctctaaggaatattattatcttctcttatgcagctgtggacttggagaacaaataaaaacacatcaaaacagacttaaataagaagacacagatcccaaaaagtttcttagagtcaatttcccccatttgttctctttagaaattaatgtggaatgaaaggcattatacaaaaacatggtgaaaagaaagttagtgttaatcgccatttattaagactacaaatatttatcacacagaatccttccaacaaccaaatctatcaaatatgctacagttcttcagatagcattctaaatacaatttgagtacgtatattgcatatgcggtattacaatcagccaatttatctaatatattctgagccaacatatatcacagttcagcatcacaagtttattttttaaaaaaaaaacttaagtacatacctggaatgtattttactacataaaatggcaatctacaagtcttaagcacaaatattatcttgtagttttaagatggcttaggaccattttcatttgtaccagaataaataaaggcaattcccttgacatttggaattatttgtgtcatgagtgattttcaacctctactggttaattttaaacctgaatttcatacctcagaaacactatgatatctccaaaattaaacagtacgaaagcagggacttatattaagcacactttgggtcagatctaataatgtttaaggattgcaatattggtttaaccagcatgaaatataaagtattctgactgacagacagaagacaatcacccagtcgcatcagtgaatttgtatgctcagactgcaaaatgatttccacattccttaaccaacctgttggctatttggagtgagaattaaatcataccgccttgggagcactgagcagaaataagccagaaatttgctcttgattaatacgttagtgtctaagcaactttaattacctacacattcccctcttggcaagttctcaggtggacactatccaacttttaaaactacataaaagctgtggagatctctgctttgctaggggtgtatatgaggtctgcctgtattcagcagctgtctttcgcagagagggttcactaggcaaaacttgtttgctagtttttcgtcaggaattggtgcatctgtaagttgtttaatttaactgaaatttaccatagattgttcttatcatttggaatgtgcgagtttcgcataagcttctgtaagtggctgttcccaacactacttactgtctctgtggagcttgttatacagcctagatacgcatcaggtttctgtaacaggtgggtgaactgatatttggatttttttaatttcttacaaatatgactttatagaactgaagaacatgtttaattacataatttttctttttctgtatttgattatgtcactgcaattaaaataaaagcactttgatgcaaagatcatttcttttcctgatttggtatgtgtcataactcttttctagaaagtatacaccgttttgacctgatgtgccacaaagagccataacagatgcctccatttctaaactctgtcttccaaacagggaaaaggacatccttttaatctagatacggagcactgatctacatagccaagatgggacctttctctttaagaagcacagagctacatgctaaaaagcaatgtaaagaaatcccatatatatttcatacttgatttaaccaaacaattcctatataaaatattcacatgaaaatcatttgatataagcatatcatttgagcttaactcttctttgatctgagatccataagctaagtgagggcctattggcatctgtgtgggacaagtttggcatgtccactgggaaataagaagtatattaggcctggttgatagttcaagttcatgttgatggcatagcaagccaatctgtttatgcaaacaatgatgagatgctaaagaagtcattgttaagaatatacacctttaatcctagcacttgggaggcagaggcaggcagatttctgagttcaaggccagcctggtctacaaagtgaattctaggacagccagggctatacagggaaaccctgtctcgaaaaaagaaaaagaaaagaagaggaagaagaagaagaagaagaagaagaagaagaagaagaagaagaagaagaagaagaagaagaagaagaagaataggaggaggaggaggaggaggaggaggaggaggaggaggaggaggaggaggaggaggannnnnnnnnnnnnnnnnnnnnnnnnnnnnnnnnnnnnnnnnnnnnnnnnnnnnnnnnnnnnnnagaagaagaagaagaagaagaagaagaaagaagaagaagaagaagaagaagaagaagaagaagaagaagaagaagaagaagaagaagaagaagaagaagaagaatatagctttcttaggactaatgagatggctcagaggttaaaagcattggctgcttgctcttccagcggtcctgagttcagttcccaacaaccacatggtggctcacaaccatctataaagggatctgatgccctcttctggcctatgactatatatgcagcagcactcatacattaaataaataaattatatataatatatacatagatatcatatataaaggttttaaaagagaaagaaaaatatagtcttcttaaaaggaagaggtgggctttagtacaataatattggggtaacctcatttcctcagtggacagatcattcagacagaaagtttgcaaaacaaaactgtctgaactgaatgacattggacccaacagacatttatagaacattcaactgagatgcagaacaaaagatattgctccgttttttaagctggagtgttctcactgtgctttgtgtttggttttacatggacagcctttgtcaggcatacaatgacatatccaccctcattacttcctccctttagtcctctccattctctgcctgcttatatgcttgtatactgtctcactcttgtcttcttgtcatatgtatatacccatatgaatatatttaaattaattcatgtacctatgaagagttctaggacccataagagcgaaaacattgtatttttatttctgcatcttatttacatcagttaataggatgacctcctgttctgtccattttccaggaaatgacatcattgagttctttatagatcaataaaactccattgtgtgtgtgtgtgtgtgtgtgtatgtgtgtgtatctcacattacaccttttctttatttcttcacttgtttgtggacagtcagattccatactttagctgtgaatatagctgcttatcaaacaaggatatgtaggtatctctgtggtacgttgacatagactcctttgggtatgtatccagaagtatgatgctgggtcatatggttgttctatgtttaggttttagagacaccactatactgaattccacagtggataaactaatttatattcgtatcaacagtatataagagttcacccttcccccacatcctggctagaatttgctgctgggttgttgttattgttatttaataacttggaggagatcgaattttcatgtagttaatttgcattttcctgactattaaagttgtttaacattcttcatgtttttttttaattctttgggaattgtgtacaatgtattttcaatatattcacctcccctctcccaagcccaccctactcacccaactttttgtctgctgtttttaaaaacccaacaaacccaatctgtgctacctgtatattgagtttatggccatccactggaacatggtcaacctgccaggaaccactccctcagagaagtctgactctccctctctcatagctcttcagttaggggtaggattctagtgcccacatcccttctccatgttggtttctctaagttgaacttgcccgggccttgtgtatgccaatcgcaacagctgggttcatatgtgtggctgctgttgtgcctagacaaatatttcattctagtcacccactgcttctggcacttagcatatgtctgtcctctcttctgcaatggtcccttgagtgtttatggtcatcttttgagatgagattgctcctgaccacgcaagtgctttaccactgtttacataaacatgttgtctttctattctattcatatctcaaaatatcttttgaaaacagtcgattcatttcatcagtatgttgattgattgattgattgattatcagttagttggttgactgactgggtttttttgatatttagttatttgagttctttatatattctagctattaatcttctgccgattatatagctggcaaagattttgcccctatgctgtaggctatctttttactgtggtgattgttgcctttgctactcaaaagctttcttaatttcatgtaactcaatttgtcaattcttgaccttatttctttacctattgcagttcctattaggtagtcttcctatactcctatctcttgtagtctttttactatactgtatttgagcagttttaaattttcagctctaaacctatttcatgtattctaatttgattttggcacattttcagagagaggaacctcactttatcctccagcacatggctagacattttttccagtactattcactaaaaaggctcacttttgaccagtgggtgctttgatgctttgggcatctttgtcaaagaaagacacaagagtgtctgggttgaattctgtgtcttttgctgtatcccattgacatgtgtgctgttttgtgccagtaccatgccaactatgttatgtccttctctagagtaaggcgaagtcaggcagggactgaggtgcccccagcattactcttcttgcttggaattactttaaatactcatattcctcgtggatgcatgtaaactttaagatttttttcctagtcctaggaaggatgctactggagttttttatgggatcgccctgtatatacgactcagttctggttttgcaaaccttttggaaaggtttcccattttctggtgtaccttcactttttctttagtgtcttggcattttcattgtaaatggctttcacacctttgattaggattaatcctaagtgtttaaaaatattttgaagctat

SEQ ID NO: 1265 - DNA, 4205 bp, Mus musculus
gcggtgcggcagccctgtccggactccaccgcgcctcccaggggctctgacaccaacccaagatctgtggccatttgtttccatggttacaaggcacaatgaggcacactggctcttggaaattgtggacctgggtgacaaccttcctgcttcctgcatgtacctgtctgacagtcagggacaagccagaaacaacctgccctacactgagaacagagagatatcaagatgacagaaacaaatctgaattgtcaggctttgatctgggagaaagctttgctctgaggcatgcgttttgcgaaggtgataaaacctgtttcaagttgggaagtgtgcttcttatcagagacactgttaagatatttcccaaaggccttccagaggaatacgctatagctgtcatgtttcgggtacgaagaagcaccaaaaaggaacggtggtttttatggaagattttaaaccagcagaatatggcccagatatctgtagtgattgatggtacgaagaaggtggtagaatttatgttccgaggtgctgagggagatctgttgaactatgtttttaagaatcgagaactccgtccactctttgatcgtcaatggcataaacttggcattggcgtgcaatcccgagtcctttctctctatatggattgcaatttaattgcaagtcgacacacggaagaaaagaattctgtggattttcaaggaaggacaattattgctgcacgagcttcagatggcaaacctgtggatatcgaacttcaccaacttagaatctactgcaatgcaaacttcctagctgaagaatcatgttgcaacttatcacctactaagtgtccagagcaagacgactttggaagtactacttcatcctgggggacctctaacactggtaaaatgtcttcatatctgccaggaaagcaggaacttaaagacacatgccagtgtattccaaacaaggaggaagcaggattaccaggaactctcagatccattggacataagggcgacaaaggagagccgggtgaacatggcttagatggtactccaggattacctggtcaaaagggagaacaaggacttgaaggcatcaagggagaaattggtgaaaagggtgaaccaggagccaaaggagactctggtctggatggcctcaatggacaagatggtttgaaaggtgactcgggtcctcaaggtccacctggcccaaaaggagacaagggtgatatgggacctccagggccaccagccttaactggctccataggaatccaaggtccccagggtccacctggaaaagaaggccaaaggggaagacgagggaaaacaggacccccaggaaatccaggacctccaggaccacccggacctcctgggttacaaggactacagcagccttttggtggatatttcaataagggaactggtgagcacggagctagtggccccaaaggagaaaagggcgatactgggctgcctggatttccagggtctgttggccctaaaggacacaaaggagaacctggggagcctttaacaaaaggtgaaaagggagatagaggagaacccggcctattaggaccacagggaataaagggggaacctggagatcctggtccccctggtttactaggaagcccagggctaaagggtcagcaaggacctgcaggttccatggggcccagaggaccaccaggagatgttggattgccaggagaacatggtattccaggaaaacaaggcgttaagggagaaaagggagatccgggtggaaggctaggccctcctggacttccaggtctgaagggtgatgctgggcctccagggataagcctgccagggaaaccagggttagatggaaatccaggatcacctggtccacgtgggccaaagggtgaaagaggtctgcctgggctccacggttcccccggggacacaggcccaccaggtgtaggaatccctggtagaacaggctcccaaggaccagccggagagccaggtattcagggtcctcgaggtctgcctggattgccaggaactccagggatgccagggaatgacggagctccagggaaggatggaaagccaggccttccaggccccccaggtgacccgatcgcacttcctctcttgggagacattggagccctgctgaagaacttctgtggcaactgtcaagccaatgtccctgggctgaaaagcatcaaaggcgatgacggaagcactggggagcctggaaagtatgatcctgcagccaggaagggtgatgtagggccacgaggtcctccgggattcccaggcagagaagggccaaagggaagcaaaggagagcggggctaccctggaatacacggggagaaaggcgatgagggtcttcaaggaatccctggcctctcgggagctcctggcccaactggaccccctggcttaacaggaagaactggacatcctggtcccactggagcaaaaggtgacaagggtagtgagggaccccctgggaaacctggacctcctggaccccctggtgtcccgctcaatgagggaaacggcatgagcagtttatataaaatccagggaggggtgaatgttcccggttacccaggacctccgggccccccaggtccaaaaggtgatcctggcccagtgggagagcctggtgcaatgggcttgccaggactagaaggatttcctggtgtaaagggagatcgaggcccagcaggccccccaggcatagccggcatatcgggaaaaccaggtgccccaggccctccaggagtaccaggggagcagggtgaaagaggacctattggagatacaggttttcctggaccagagggaccctcggggaagccaggcataaatggaaaagatggattaccaggtgctcagggcatcatgggtaaacctggcgacagaggccccaaaggagaacgcggtgatcagggaattccaggagacagaggccctcaaggtgaacgtgggaagccaggtcttacgggcatgaagggggctataggccctgtgggaccagcaggaagcaagggctccactgggccacctggccaccaaggccctccaggcaatcctggcatccctggcactccggctgatgctgtttcatttgaagaaataaaacactacattaatcaagaagtcctaaggatttttgaagagaggatggctgtgtttctatcccagcttaaactgccagcagcaatgttgtctgctcaagctcatggaaggcctggcccaccagggaaggacgggttacctggacccccaggagatccagggccccaaggctaccgaggacagaagggagaaagaggtgaacctggaattgggctgccggggagtccgggtcttcctggatcttcagcagtgggtttgccgggctcaccaggtgccccggggcctcaaggacccccgggacccagtggaagatgtaatccagaagattgcctctatcctgcacctcctccccaccagcaggcaggcgggaagtgaaaaagacggaggaagacatcgcgtctagtgctatctccaggccacttgagccgccactgcaggcttcacaaccacgtgctctcaaggcttatgagtttttggactgctttattttagttttctgatacagaagcagacatccaaagcaaccatctgagtcctattctgacagtaagagcagatccgtattttcagatgtttgccaacttctttccatatgttctgtttcattgtggctctgagttctacggcttcggaagaaaaatgcaagcgagcctgtcatgggctcttcagaaaaaatcacgtgagacgatttggtacacagacgacacagaccttgtgaactcgtcaacgtgactaggttttgattcctgaattttaacttttctaatttatcttgattattttgttcatatttaaatttactatcgttactttagtttttctttctgctcttttgagattgaagtagtacattactgctgttgactgtcttaggactgatttttacaagaagtcctatactgtcctacattcattcgatttatgcagaaaaaaatatgcaataagagattcgcttctaacttattaaaaacaaaactatgtgagactgtttatcaagaagcccccaaactcatcatagccaacatgcttttggctttttttggagcacgcctcactgacacgaacacatgc

SEQ ID NO: 1266 - protein, 1150 aa, Mus musculus
HQPKICGHLFPWLQGTMRHTGSWKLWTWVTTFLLPACTCLTVRDKPETTCPTLRTERYQDDRNKSELSGFDLGESFALRHAFCEGDKTCFKLGSVLLIRDTVKIFPKGLPEEYAIAVMFRVRRSTKKERWFLWKILNQQNMAQISVVIDGTKKVVEFMFRGAEGDLLNYVFKNRELRPLFDRQWHKLGIGVQSRVLSLYMDCNLIASRHTEEKNSVDFQGRTIIAARASDGKPVDIELHQLRIYCNANFLAEESCCNLSPTKCPEQDDFGSTTSSWGTSNTGKMSSYLPGKQELKDTCQCIPNKEEAGLPGTLRSIGHKGDKGEPGEHGLDGTPGLPGQKGEQGLEGIKGEIGEKGEPGAKGDSGLDQGQDGLKGDSGPQGPPGPKGDKGDMGPPGPPALTGSIGIQGPQGPPGKEGQRGRRGKTGPPGNPGPPGPPGPPGLQGLQQPFGGYFNKGTGEHGASGPKGEKGDTGLPGFPGSVGPKGHKGEPGEPLTKGEKGDRGEPGLLGPQGIKGEPGDPGPPGLLGSPGLKGQQGPAGSMGPRGPPGDVGLPGEHGIPGKQGVKGEKGDPGGRLGPPGLPGLKGDAGPPGISLPGKPGLDGNPGSPGPRGPKGERGLPGLHGSPGDTGPPGVGIPGRTGSQGPAGEPGIQGPRGLPGLPGTPGMPGNDGAPGKDGKPGLPGPPGDPIALPLLGDIGALLKNFCGNCQANVPGLKSIKGDDGSTGEPGKYDPAARKGDVGPRGPPGFPGREGPKGSKGERGYPGIHGEKGDEGLQGIPGLSGAPGPTGPPGLTGRTGHPGPTGAKGDKGSEGPPGKPGPPGPPGVPLNEGNGMSSLYKIQGGVNVPGYPGPPGPPGPKGDPGPVGEPGAMGLPGLEGFPGVKGDRGPAGPPGIAGISGKPGAPGPPGVPGEQGERGPIGDTGFPGPEGPSGKPGINGKDGLPGAQGIMGKPGDRGPKGERGDQGIPGDRGPQGERGKPGLTGMKGAIGPVGPAGSKGSTGPPGHQGPPGNPGIPGTPADAVSFEEIKHYINQEVLRIFEERMAVFLSQLKLPAAMLSAQAHGRPGPPGKDGLPGPPGDPGPQGYRGQKGERGEPGIGLPGSPGLPGSSAVGLPGSPGAPGPQGPPGPSGRCNPEDCLYPAPPPHQQAGGK

SEQ ID NO: 1267 - DNA, 365720 bp, Homo sapiens
gtgtgttatatgctttgaatcttgggtcaccatacaggcattaatgcctatattcctgttataatattcataaagcctcctttcattcttgaaaatattcctgttttggaataatctgtctggccgcccaatataaacccttctgcatatatcaagtgaaaagcttctttatctaagaggcaggagtcatccaagatcttctctttgcagactacacccttggagagactcattaagatgaaagacacaaaaaggcctaagaattgatttactttgatcacttaaagaatacatcttgatgtttgaaaataattttaaaattatgttttcatgtgtgtatatacgtgattttaaaatatggacaattttaactttaaatttagccttggtcatatgaacactactgggacttcaatatttaaaaaatatattataccaaataccagtattttttagtaactgggttattattatgttctcttttcccaaaataaaccgacagcctcacaaacaatgagagattattaaataaaggaagaaatgttaggaaatcatgtctgactattttttccactgattgcaacctgacattattggagatctggtcctttacacagagtgggaaatctccaagacgactgaaggtggttgagtaatggctcagacctcagccactcactaattaacttacctgctgtatcaggaaattatgtgagtaaatatggtcatttacttaacttatttgatattcaaatcactggattattaaaataatattttgccaagtcttacacaagtgactttagtctaaaagaaacttaaacactggatccacacagacatttttagtttatttcttcaagcccataaaacaactctaaaatgtagtgtttaattgtccctaccctgtctatacatctgtaagagtctctgtgctcataattataattatgattcatgaaaagcaaagaagttctttctctggaatcccttacttttcccctactgtctccttttttcctttcctcagtttatctaaggtgattggacaggagtcatccagggctatagcaactccagttcaggttgagggaccaaggaaagctgttaataccctaccttctgtgggaaaaatctggtttcacttgtagaacttgctgcttcagtctgttccctcttggagaagctagtgcaattctaggttgccgcttctatgccgtgcccctctttctcctcacaatgtgataggaaagcacttggaagggcttgtgcccttgcttggcaccccaaggcaaattgtaacacatggccttgactgtcatttatatacgatattctctccttttcccccttttctaaaggatgagcatttgaaaacaatgcaactttaatttttattgattaaagggagcataaaaacatgattggctcaaaccattttaaaagtctattgtatccttgagatataggtttgttctatgcctctgtttccttcagcccttacatccagcccttcagtgagtcttttcaagtctacctctaaaatgtgtcttgaatttgtttactttttatcttctacaaatatcatcctcattgtagccatcatcatctctcgcctgggtacaacagcttcagaaatggtctctttatatgtattcttgccttgctacaacctattctccatagagaaggctgtgatctttttaaaacaaaattcagtttatataattcccctgctcaaaccctccaatacattcttaccttgttagtgtacaaaatacacaattcactgaaatctaaaaggccctgcaggattcagctgcagactatatcatcctttatctttaccatgacctcttttgcttacctgcttctaggcatgaagccatttctatagtcattggacagacccaggtctgcttaaccttcctctgatcttttcagggctggctcctttctggcattcaggtttcagctgaaatatcaccactttgagaggccttctacagctattccatctaaagttgtcccttacaacctccgccggaaacttttaatcacaccacattattgtagagacagctaacaggtttttgttttgttttgttttgttttgtttttgacactaaatttgtaatggctaggtgcaaacagttctggtaacttcctctctcaggcccctcaaggtctaaagaagattaaactggcttaatagtcattgtcaccagcaaatcagtggaaactgcaaaagaaaaggagttcttctaggagagaaaggattgaagataagccaaagagtccttctcaccacatttggggtatcggatctctctcccctggggcttgtgtttctgaaacctaatgataggactcacttcttcccttgaaatttctgaaggagggatgcctgcagggcaagtggaaactacagtttaggttttctaagaaggaaaggttagggatgtccacatcccagttctccacatttctgggaaaggatgaagtagaggatctcttcagtttccatgatctcatgtgaaagtgactggcattagctaagggataggacttgtagagctgaactggtagttgcttagtgggatttctggaggcaagagacattaagtagaggatataggacataccactggtgggagctgaatgaagatgccctttgtgcatcttcctaaccacagaaaattacaatgtccccaattcatcaccctcttatatctgtgctctatgcaatgtaacttcgaagcttgtcccatcaagggatggagttttgactcttacctggcctgtgacttgcttcagccaataaaatttggtagaagtgattgtgtgtcagttctgagcccaagctcaaaaggccttatgagctttcattctgtcttaaacccctgggatctcttggaccaggctagtctgttagaggatgagagatcatatggaggagagatggcttttccaagtaatccaccttcctaccagccaatactcttatgccctgccagctggtggcagacacatgagagaacctagctgagatcagccaagcccagcctagaccagatgaatttcaaccagcagacttgtgagcaataacaaatggttattattttcagctactgagttttggaataggttattatgctgcagtagctaatgatacgtgggtgaaaaaagctgaatactgtctgagaataccatttgttaccttctatgcaactgtcattctaaaagaaaccaccatcagactgacattgatggagaaaacaggtctttcctttgtatcttagtccatttgagcagctataacataaaaccataaactgggtaaacaacagaaacttaatgctcatagttctaggggctgggaagtccaagatcaaagcagattcagtgtctggtgagagtctacttccccatagatgtctatctccttgctatgtcctcacttagtggaaagggagagggcctctccaggtccttttttataagggcactaatcctatttgtgaggtctctgccctcatgacctgattacttcccaaaagcctcacctcctaatactatcaccttgagggttaggatttgaacatacaaattttgaaggacaaaaagcactcatatcatagtgttctgcctcagatggcagctggctccggatgcagctagcatcccaagggctggggccaaaactgagtgatggcaccgcagcagaaccagctgagcagtaaccacgattagggataggattaggatgagagccattgtctggcagccaatgcaagcaaatctttggataaaagatagtggacttaagagattttaatgttgctatctgaagcactagaagttattatgaggtttttattaaaaataaaacagctctgtgtggaaaacaattctgtactttttggttaacatctgaagtgatttaaaagaagtatagatttatgaactattattatttcctttactagctatgttttatgacttctcgtaattactttaaaaggggttttataaacatagaagtttacatttcaaatgggtaaaaatgggtttctggtaaaataatttgacagcaagaatgtcctcaaatatcaaaaacacaggtaaatctgtcacctttgataaagaacagagtcaagtccaatttatcttattttgccttagttgaatagtcaactacgaaaagctctttgcctagtctgctatgttgtcattttttctcttttaagccaacaaagactaaagcatgttgcagcatatgaataaagaaattctagatccaattaattcatttatggttttcttttcattaaaattggttcttgttgtatacgtatttttcttttttgtaatatcttataagaggaatgatgtaactttgccaggtaactttgaggcctctgctctgcttgagcacccactgagctgttcttttgggtgttgtagctctggattgcaaataggtgcttgcagaacatttgttaaagaagtgattgaagactaggtactagagcatagtgaatgtgactctgaactttggaatgagacagatctgggtgcaaatcctggctacatcagagatttgttcatagccttattgtactgtaaaaataggacaacaaaattactgaaggagttaaaaaagatgaactatgtaaagaagttagcactgtgcccaggctagcacaaggggatttttacaaaatgattctatgagaatcatggaataagctaaatcagttctaaattgaaaataaatgttccagtaaaaagttacaacaaagagaagctcaattttatagacataaactttacataacatatgagccaagtgatcatttatgatacgccaatgttgcattattctttttaaaaatgttgtagatagaattggttgtttaaaaacatttaggagttagatcatttttcatggtctaataataataagagattaaacagggttgtgctctattactgatagtgtaaatttaccttaagtttggtaaaggaatgaagagaatatatgatgaggatgttttcaattgatgagagtcttgtcttcctgtgttgctgtcctcagagttcctgctctgggagtcttttataggtgagaacattttttcctgtgattcttttatcagtagaataattcccttagatataacacaacaaggaacccatcattttttccagacaaactgtaagactcagtccatacttcgtcattagaaaattttatgtccttgattatttaacctctacaggtttcatttcaacaaatatttgaagactatattaagcagaattaattcatcatacttgatgctccgggtattattaaaaatgagaggacccaattccagtcctcaaggagcttacaattaagtcagaggatgcagtacaaaaatatttctgaaacaaggccggggaatgtagatcatcattaaagaggcacaaattgtgctctgtgctgttcagaggcagaggagggtttgtctgatgggaggagggcaggaaaggaatcatcttatagctaacacctgaagtaagccttgaatgactggcagaattcccaaagccactttgcatttcagtgggaggcagcaacatgaatacgctgagacatgctcattctgcggttacaagtcactaaatctggttgtggcaaaatgtacatttaagggaactgataagagtagattgggtgacactgtttaggactctgaatttggcaaaaggttttaattcagcaggaaataagaaatctcatgttcttcatctgaataagaagtagccttgttctctgtggattctttcaacaaacatttattaaagaaacagtaaacccataatttcataattatttagttacaatgcccttctccgtactatgattctataattatttgtaagtatatttatttagactaacaacaaatggatagattttgtccactgaaattttttgattccaatgcttccacatttgaacatagtccctccaccttagaactcagttagagctttataactactttgtttattgcattttgcatgttcatatcctattattattacgtatttatacatgtcttcttcttccttttttttctgaatgttaaactccagacagtggggcccacgttcaatgtatctttgtatactgtgcagtggtcggtttaagaagcattcaaaaatatatgttgaatgaataaacaatttaattaacatctgcttcctagtgaaatcactagactcagtttaaatggcttaaattacatactaatttttacctggaagattcttgttgaaaatgattgaaaatcttatttaaaaggccaatttctcggctctcttaataccactgctttactaatttgttggagataaaacatcgcattttttcaagtttgttatatttttattacaacagtaacacatgttcactgcagaaactttacacattacatataagcaaaaagaaaaaatcacaattctcaaaatctcaaactataagtaaccacagtcactgttttagggtagtttatgatgcagtctatgtgcatttttttttaacgcttttaataaacatggctaatttgccctttagaaacactgaactattatatgttcctggaattgttgagaatgctcttcgcttatactaacaccacgtctaatcagcaatattaatcttggcagaatgggtaggggaaaatagttcctttataaatgtgcatttctttgaatactaattaaattgaatatttttcataaatgtattgaccttttctatttcctttgtaaactgcctctttgctttttggcctatttttctattggggtatttctttctctctctttcactctgtctctcaaatgatttttcagaactggatgtatattaaccaacattttccccagtcatttgtcttttaccatatttcctttcagagtcactgatccctaggaagagtctaataaactaagtgaaagtcacattatgatcgcctcttcctttcatttctaaactgagtaaatgtcatgagctagaatgtcttctaggaagggaagcaaacctaaaaacaaccagtggaatattattttctctatgaagagaattattttcagaagcaatggtaaacacagcatttaaaataaaaagatgtcctaatttacttttggcaattactaagaatttagaattgatataactactttctttttacccttaagaatatcatacatagtgctggcctaaaaaggaatataatgggaagtgcatgctagggatgacaagtcagatttggtaattacagttaacagtaacgtctgttcatccactattgacgcattgaagtatttccatgggatatgtaagggagtcatgtatagctgtgccccataaattcaataaagaatgaacactcttatggtttggtaactgagaagttagctgggggcaatggtgaaattctttcttcctgaaaaatggaaactatgaaaggggagaaaagtgaaagacattacaaaagggaacaagagcaacatgactgggagtacagaagtatagaaaaaaggaaaaaagaaatagacataaagtagacgagattgacaactaagggttaggagaaacacattttaaaaatgtattaaatccaaattatcaaaaatggtacaatgatcattgtaaattgttaaatttatatcagtggggcatcacaaatatggaacagttttttaaaatgttttcaatggaatttatccctcacatgacataaaaacatttaattgtatcttcctttaggcataaatgttgaaagaagttcgttttttaaatctgttaaattttttaagtacatacgtgcacacagatgaacttggtgttagaagtgctgcaagctgtttattaaaacttagagtgctgtcagattcccctgatattttcagatgtttgtttaccagcagtagcttcagaagcaagaagaaaaccggatcatttataattgtatttggcttagataaataaaaggtgtttggctaaaggttcttcctaattgaagtcactttaaaattcaataaaaagaactggctaaagaagcaaaccctaggtatacaatagtttgtaatcatgaaaccagcctagattcaaaccctttcctgaaagaaaaatagagaaatatttgttgccctggggatgttggtgtatctagaaacagaataagcaacagataataataatttgaagttttatttattcatttttcactttcttccaaaatcttgcttgggtcaatattagaaataagaaaagggccattttgaaatataaacaaaaatataagtgtttagctctctcaaatatcttaacaattatgaaattattaaaatgtttaagaaaataattctaagataaacttgatttacttgtattaaaacaaaaattagagacaaaactgtggacttccttttaggtagttttaaagcattactttaaatagtttcaattaagtgtaaataaggtgaatttaatagtctgacaaagaaataaagcctggatgctcttagttcaattcattagtgatggcaaggtatataaagtaaaattgcttagagaaagaaaaaaatcaaatgggataatacttcaaaaaaatagagactgatcaccaaaagtctaatgaaggtttgtgaatcatgtttttcaaatggccatttgagtagcgtgactcatgcaatatcctccctccttggcctctttccacagtcagccaaaaattagtgatgaaaatcatatgagaaggaaatgtatcaagtggttttaaatcctgacatagaaacatggtttgcatcaccatgaatgccgaactctaaaactgcaggtatcttgattaggttgagagagaagtttaaaaatcacaagtgatactttaatggtttcactccaaggaagtggaaaggagctatcttttaacatttttcttaacatctttattttttgcctgcctgattttatttattccttgatctgtgagctctgatatgtgaagtgtatttctatggttctaaggtaacttttaagcttgatgattttcaccattgtggatcaataatataatttatcctatttctcccactgtggcaatactgaaataaaaatgtaaaaccagtttatctgttttctaatgcctggtttactcttctgaattctataaatcattctgttttccatatatacacatacatatgcatacactatatgtatacatataaatttactatatatgtatatatacctacaaatatatatgcctacaagtatccatatatacctcctatatatgtatataaacctactatatatgcctacaaatatatatatactctctctacacacacatacatgcacctacacagaaatctgcaggaaaatgacactttcacatattcaaagggatcccaaaagagttcaaaagccaagactggaagcaccaacccatggaaagatgtatttaaaatcacaaaatacttctgtggacactgagaaaaaccaagccacacaaacgtttacatatgagcgtgattagaaggtgggcagactgccttaatcaactttatataaactcttgacataaaagtgaaaaaatgaaacataaatgatatattttcttagctcaaccgttaaaaagccaattacctactcgtgaacgtttgccacatacaataatactttgaagacacttcatgatcagaagtgagaaactctaggcatttgcatccaaccgtcattttatctgtgaaactgctagtaaaacataaacctgaaaggcattactcccagctctaaggcgacatcgctgtcattaaagaaaacctgtgcctgagttggctgagtaccttcttgcagagtcctctgtcctcgcggagtgggagggtcacactgggagagactaataagggcagagatgcgtcccccttccccactcgcagggagctcactcctcggcggtgccgcagccctgtccggactccactgcgcctctgaggggctcaaatacgaattcaaggtaagctgcgcggctttgcgaccggctctgcacttgccctctcacacatgcccgggctatgtcatctgctcgtgttcctagttatctgtgtgcatctgcttttcaagaaaatgtaaaaactgtgctacacatggaaatatgtttaggtggataaataatgcacacctgcatacgtttccataggggccttaaggatgggaccaaaaacgtttggcaggagacggccactctcatgtggtacataccatgtagttcgtgttcctatgttcacatgatgcaggcttcatgcgttacacctaagttctaggtggtttttctggctatgtgtgtctgtgaagcggaactatggagcactgctgatgcgggtagggacagacatcaaatacattacaaaaaaaatggggggttaaaggagtaaaacaaactcactatcaattcatgccgttagagcgctttttttttttttttttgacggtgttagccctggaagcgaggcagccagttaagcggcgtaagctaagagacgcggggttccggtgcggtgccctccggcccggggttacctactccacatgtgggtgtttttcccaagtgcggcttctggggggcggcgcgggcgcgggcggggattcccggactccagccccaccacgttccggagcgtccggccctgttccttaattaccctgcagcatgcgcagcgcggtcggccacagcgccgccgccgtccccgcagtcctccctgcagccaccgccgccgccgccggaacgtcccagtcgcggcgcgaggaagacgcggccccagcctctgccgcctccgctgtcagagtcccgaggccaccgccgagagcgcgccggcgccgcagccacagcggccgagaaccaggaggcggcgccgggcggcccagctagggcgctgcagggtcgcgaggaagtttgttggcccggaaccaagcacgccgtcgggcacgctagctccccgagagcaggcgggcgcgtaagcgaacccccttagaggttacggagggagcgggaagccggcaagagggtgggcagaggagctgggggacaggcgggtgccacaggagcccccgaggagcttcatttgatgagaaggtgaagaggcagaggggaccagcgtgccttgtcagcctcaggggacagtgggctggagagcaaaaagaggagggcccagaatgctgataataagtagttttaatagaacaatccgtgaatagaggcaagagagtgatcatcggccacagcttgagattgggagatggaagagtaagggaaataaattgcgccacctccctcaatccccaattccaagacgactcagtcccatcttctgcttggataagtctgaggaggattaagatgtgaggataatcactctgctgtaggggaatttacatctgcctgttaatggaggagatgaaacaaacgcacaccagtatctattttcaaccaccacccctccccaaaaaggagagaacaccaatgcctccccctctgcccgaatcaaacactgctataattctttaggagactaaagggaaaaaaaaaaaagaaagaaaagagcccctgctcgtatgtggggtcttggcatctccttgtttttgagtggtgggaaacttgcaggaccctctctaagtagagagatctttgatatgggcctgcaaagctgagatatttaggtattccagtggtgaaaaacatgcataaatgccccttcctgaggagggctgacagggtttttgtgtaggaatatctcttcaggatgaaaaagaggagggtgacccccagaggcagaaaatttatgctctctctaggggatagaaagtggagaaagtaactgtcaggtgcttccgttaggttttgtcctacctgagctctctaagtgctaagggacctaaatggggtttcctgggaaaggagggagacagtatggcaaaagagcaggaaagtgaacctgaaactgaaatggacaggactaagaaagagcaaaaaggtgaaagaaacccaaatgtgattattaccacaattgggacatcatctctatatctgaatcattctcatcctagaaaaccatccaaaacagatgggaactgttggtattttccaaaaatggaaaatttccatctactttctggtcctccagtttaatctctcctgctgcaattttagtttattttctccagcaggcagaaatgccaatgtgggtacacagagtcaatggttctagaggcggaagaagatatgaagttagaaaccatggtagtgtgactaagaggcatcacaaatgaaaattcaattgaagtatgaaaaataaactgaaatgcaaggaagtagggctatagatatgctaatatataaccctgaaaagatgctggaaaaaaaaaaaacccagaatgaataggaccagaattgagtcatctgaggcaggccacattgaggatgtacatcttaaacaggcagagaataactagcttagcagaagagatccagcagggagggcattccagccagaagaaattgcatgtgtgaaggcttagaggtaggagcaaacagtcatgtgcctggtaagacagaaaatccaagcggggtgaaatctgagatgagtagagcagatagcacctgccaaggagagattggaaaggactggctaagaagcaataggctttttagggtgttattttgtaagccaataataaaataatcaggtgagcaagttgcatattaaattcgatagaaatatgatgtatgcagagtggactattaggcctctcttatctatgcatacgttatgaagcacaaaggatttctgacctcctctttttaagagaaatcaaaagtaattgtgaaattttaagattattagatcagaaaaccagtagagcccttcaaattgaaaaaaaatgggaaaaaggatgaatttgaaaatacggccatatattatatattaatttgagatgatattggatcattgatatagatatatctgtggaacacaacagagcaagagaattgtaatcagaaaaaaatgtaggtcagttgtgatggttgaaattgagaatggtaccggaaaagttgatggaaacaaatcatagttcagagaagtgagtcggtaaaacagacaagttgatgagaatggagagaataggttaagtgtgctcaaagggaatcccaggtttgagaccctctggaatgtagacactagtttggaagtaacagaagtaataacaaaactgaggaaatgtaatagagttggacatatttcaaagtagtacaaacattaggaactagggagtatgctttctgtggaggcagagagcaacttcaatagtactatttttttgtcccactaagtaactgaaattatgttcactgagctttcttttagtaatttttactctatttctccatcattcttttctttatgcccatcattctacagatgttaagcccatacctgtctatattacttaatggttcccaacctttgatttgtttatttttagtccaagtgtattgccttagactgtatcattctacagattgatcccatgaatacctactaaatgtcaagtttaaagaagacacagataaataaaatacaatctgttttctccaagatgttcaatatagggaagagaaagaatgcaaaggagttatagcagtgcagtataaagtgtgcagaagcataagtgggtattgagctctgttgaatcacaggacagtgagtagtgaactctccctggtatgattctcacagacttcacagaggacatggcatttgagctacacgttgaaggcagactaagtgttttccagatcggagaggattggaaggactttccagtagccaaaaaagcacatgcagaaacctgtgaattgttaataatttgatggcggagagtgtttggaaggaggtagcaggacaggtggttggacagatgagttgaggccccactgtaaaagagccttgagtgcctcactttggagtgggcaatgaagagccaccagaaaactttgagcagggcagttaagtgactaggtctttgttttagaaatagaattcttgagaagtagggaggtggaaataaagggaacaagatggagaaaaggaatccagttaggagtctattgcaattttccagattaggaatggtaaaaacgtgaactaaggcagtttcagcgaggatgagaaagttggtatggattcaaaagacgtttacaaatagatttgatagactttgacagagatttgatatggggtgagggtgaataaattgaagatgattttgaaatttttaacttgagttcctaaattaatgatgatgcctgtaattaaaatgtgtaggtcatgaggtttctgtagaatataatgagggcagaaactttgcctaaattgcaaaagacatctgcaaacttacttcaatttaattactccagccactgataaaactaaggaataatgctagacctagtcgtaaactcttagggatattttgcctgattattggcttgaattttttactctataggcttggctcttcagctggttttctctaatagtttacagactctactatagcttcactaaagacagattctaaagattggtgaaagaacagatgtgtaacacctgttgtttttgcttatttacacaatgtgtcacttcataacagtatgaccagatttgcctggtggagttacgtatgtataggcatactggatggtggtcaagaagttttgatttaaaaatcaacctacacagtcacacattatttccctttataataaatgctctgaaaacatgagttctttgagtcatttaacaaattaaatctacttttttgagagttgagatgccgtgtacattaaatgtaacaacgtatgtaaagcaaataagtgttctctttctatttcctcctctttctctcttttttcatggttcctttccatattattttctattttggtgttggctttaacactctgaccttttacctaacaccaagtttcaaagatgtacaatgaacactttaaattgttagatggcttaacagtaaaaatgttaatgtttcacaggcagatttgatttggctcactcaaaaactggtgctgagaggctcctgaccatcttatttagcaagtccaccatttttttttttttttttttttttgaaacggagtcttgctctgtcgcccaggctggagtgcagtgctgtgatctttcggctcactgcaacctccgcctcccaggttcaagtgattctcctgcctcagcctcctgagtagctgggactacaggtgcctgtcaccacacctggctaatttttgtatttttggtagagacgggttttcaccatgttggccagacttgtctcgaactcctgacatcaggcaatctgcctgccttggcctcccaaagtgctgggattacaggcgtgagccaccatgcctggctgtacatgttattctttgttttttgtttgtttttttgtttgttttttgtttttcattttaactctttagtgtctctcaaagaaaacatgatgtttgtttacttttgagctctgtgaccagagtggtacaatggactttccctatttggctcactgatttatccccagtgattgttacatagtggaacctcatcctatcaataggtatcaataggctatctagaggccaggtattaataggatatcaatagatatcaatagaatatctattgataggatgaggtttcttaatgcctatgattaatggtaatgagtaatgattaaggtttcttaatgtccctctctattcattttgtgttttctatatacaaataaagattaataagaacttaaaaaaatctatatccttattcaaatatctttggtttcgataggtgccttaatgatttcaagagctagattaagaaagttgaagggacaatggcgttttaaaattcacttacccagctggtacccaaaattattccatatggcaaatgatggtgagaataatggaatggggtaaaggttagggctaggccttcagccacttattatctttttgttgccataagaaatatattacagggacggctgtctgaatgattttaagactttataggctccatcaatgttgtctactcaagactgccagtgctgggcacactcaccattgtgattttggtgctttgtagcactggggaactctggggtctggccagaatcttgatagaaatagctgaaaatttaagagaatgcatgtaggaatgtgatatgtctgtcccacatcctgagagtaaacattatgatatagcagtaaaagcattttagtcaggcagacttggacttgaatcccaggctttgggattattctatgagcgttagtgttttttatgtgtaatatgcggatataatacctgtcttcagtaccaacattaggcctgctctggaccctacattttagaacaccccactatagtcttgctctggatgtgcacccgctctcagagttaggagtttacagagctaaggggacctgcccacctaaaacctgagcttctagaccagtctctgaataatcaagatcctgaaattccctgaaaaaaaaaaacgatccttaatcccccgcagcatctaacagaccctgtcgttgggtccatcttcccagggaaagaccacaggtgtaaacactcctaggcccaaggaatggtcaagagttagctgtttgcaggcattatggacacaactttgacttactggcatatttacatatgcgtgtgtgaggcttttcaagctgcagatggacccaagaaagaaaaaaaatgagggatgaactttggtttaggccagaggccaactcatcccatatcacctgctctgttacattctaacttgacatggactttcaagactttatgaaggtatttgctgaagaaaaatgagaaagcatattattttttatgagtgttattagctttattttaactttcaaatatttaaacatatggtatgcagacctcttgccctgtacccaccctcataataattaacccaatgccttaaagaccccacctcttaatactgtgacattggggattaagtttctaacacaggaaatttgggcaacacattcaaatcatagcaccaatattctccatagccttcttaatatgtactgtgagccatctttggacaagtttgagaaaaaaatttgagggccttaagaaacctcaggatccacatatattagcttgaggttcttcattagccactccattgagaaagcattaaagatctatattatagcttaacttttatctgggaggagcaacacattaaaatctgacaacattggcttggttcatttgtaaatctatcttgataatcacctagctgggacctgtggggacaggaaggaaatgtggcaagttttgatgagcaaggaggttgtggacaaagccaataattgagaaatccagggaaggtaccagagatgtgttcagagcatcaagaagaagcctgagaaccgcaggtgtcagggaatggtgagaggtttctggtcaggaaaaggagaggttcagaaagacacaaggcaaactttgcccttgtcagttttgttgaggtcaacctaccggtgcctccagcaaggtttacaatctgaacaatttgtttttaaaacatatacaaggatttattttgagagcttgatgaaaagtttttcaaatgttcctagctgaatgggctacacttccattttatcaggatctgaataatagaaccctcaaatagcgaacacattttagaaatgtgcagagaggctgggtgtggtggctcacacctgtaatcccagcactttgggaggccaaggcaggcggatcacaaggtcaggagatcgagaccatcctagctaacacggtgaaaccccatctctactaaaaatacaaaaaattagccgggcatggtggtgggtgcctgtagtcccagctacttgggaggctgaggcaggagaatggtgtgaacccaggaggcggagcttgcagtgagccgagatcgcaccactgcactccagcctgggcaacagagcgagactctgtctcaaaaaaaataaaaaaaaaagaagtgtgcaaagagaaataatattcatgataatgacccttgaaagattataagatcttgtaatgccttaagaattatttttaaatattgaattatcactacagattccaaaataagtatatttcactgtatctcaagatttgtaaattggcagtctcttactttttaaaaattcaacaaatatttattgagtctctgattttccaagtactgtgcaaggcacctaggatacagtgatggacaagacagatatagtccctgctctcatggaacttagaattgagtggggagcaataaacatacgtatacagaaaaaataatgtctaagctagagaccaatgtgcttcttggtcaggtaagggcttttgcgcatagtaacatttaaattgaaaactgaaggatgaacacagaatgttccaggatgaggaaataacatacacaaaaaccttgaggttgaaaacagcctggcaatttcatcactggaaagaatggtaccatatgaggctggagatgtggttaggggcctggttatttgggacttctaggctgtagaacagcttttggactacattcaaagtacaatgggaagccattaaaaagcttgaagcaaggaagtgacatgaaccaactctcattttaagaaaagttctctactgctatgtagagaataactgtggtcagaattcagtaatgaatgaattcagtaattaattggaagctgttgaggggtctagaccagggtgatctgaactgggatagtggcagagaaataagagaaataagtggatgtgagatgtgtttggggtaacactgacatgacttgttgatggtttggaagtaggagatggggataaggaagacagaagaatcagtggggtccttgggtttctggtttgatcattttgatgggtagtaattactgagactgggaagagcatgagaagaacaatttgtggttggaaatcaggaatttatctggatgtattaagttatagatatctgtgtgacatctaagagagaattttgaataggcagctggacacacagtctaaagttcagtcaagaggactggatgggagatgtaaattttagattaaccatcttacagataatatttaaagccaagagaatggtgacgtcatctaaggagacattataaagagaggaaaggagggctcacagatcccagtattaagaaatcagatagaagaaaggtctgagaatatttaaaaggaaatctgagagagtgtcagatcagggaggccaataaaagagagtttcaggaaggaaagaattgtcggctattggaggtgccaccaagaattgaagaagggaagagaaacggattcttctttcaagttcctgctgaacttggtgagaggcatttcagtagagtagtagaatggcaattcttcgataactagaacatttagtcaactagccataaatcttattctgcaaatactttggataaatgagatagaagctaagtggctcaaggaagtaattaggagatgtcaaggtcgaattcatatgcttatagctttgtagccctctggttctttgttgttttaacagggaccaaagcttcggtgaacataaatttctaggctgctttgacacttctccattgtccaaatatcaatatcaacctcaagcttaagagacaggtacaactaaatttttccaattattgtttattaatatgtacagcaaacaattataatatcaggtaccttttgaatattgactaagttaaggccctatataatacacatgcattaaataatttattcctagtattatttccaatttgaagatgaataaattagggcttagagaaggtacatagcttttccacaagtagcagagtccagacatgaagccatgattgtcaccactgtgccaaactactaatttgtcaaccaatagaaatcacttttggttaaaaatataaccatggatttctctaaaaataagatcaatatttatgagttccttcctttgaaataaaattaatttctttaacagttaccaactgacttgaaataatagctaggataattttgcaaagtcatatgaggattaggactatatctagatgagagaattcaaaagaaataaggcttaaaaccagctgtttgatatttagaatgacacatacagttttaatattgcaattgccacttctagctattcacccagaaagatctgaaatcttgaattaattttaaaatgctgatcttagggtatttggcacacacagaataccaaagaagatggtggctttagtttttttccagagtgtctactgatagaatttagacactggtataatgaattcttttatatttgactcttgattaaactttgaatgatggcacccaagtgatatgacatttatttgcatatttagacctcttagaatagctattttaataatactgcaattaccaaatacactgagggagccattatattttcacttgcaatttatttccacattagttgcttcactaaaaaaattaatttaaatgatgtttaagttttccattacaggggtcctatttactaaatcttttatttcagtaccaaaggagtagaagtgtacattcagaaagacaattattggaggtaatacattaatattaaatatgatgtcaatggcaggctcaggtgaggtaggcgttgcacgtattcattttttctttataaacataaggcaagattacttttcacatgtgcagtaatcacttcagtaacagtgattattcaatccaataacaacatagttaagtttatagaaaacatgacatcaattaagccaaaatatgtaaaactaatattcagaaggaaaaacagacttgtgaataatataattatattttaataatatgaatcattgtatattatacaatgcaaaaagcataggcaacttaaacaactggattaaaaaaatgggcaaaggaggctgggcatggtggctcatgcctgtaatcccagcactttgggaggccaaggtgggcagatcacgaggtcaggagttcaagaccatcctggccccatctctactaaaaatacaaaaattagctgggcatagtggcaagtgcctgtaatcccagctactcgagagactgaggcaggagaattgcttgaaccaggacctgggaagtggaggttgcagtgagccgagatcgcgccactgcactctagcctgggctacagagcaaaactctgtctccaaaataaataaataaataaaagggcaaagggcaaaggagttgaatagacatgtctccaaagaagatacacaaatgattggtaagcacctgaaaagatgttcaacatcactaatacttagggagatgcaaatcaaatgcacagtgagataccatctgacacccattaggatagtaattatatatatatatatttatttcttttatttatttatttatttttgagatggagtgttgctctgtcacccaggctggagttcagtggcacaatctcagctcactgcaacctccacctcccaggttcaagtgattctcctgcctcagccttccgagtagctgggactacaggtgcccgccaccgtgcctgactaatttttttatatttttagtagagaaggggtttctccatattggccaggatggtctcaatctctttacctcgtgatcgcccgcctcggccttccaaagtgctgggattacaggcatgagccaccacgctcggcctatatatatattttttaaaagacaaaatagcaagcattatctaggatatggagaaattggagcccttgtgcattgttagtaagaatgaaaatcgtgcagctgttatagaaaacagtagtctggtttctcagaaaattaaaaatagaattattgtattgtattgtattgttagcaattttacttctgattctatatacccaaaagaattgaaagcagggactcaaacagatatttgtatatccatgttcatagtagtagtattcacaatagccaaaagatgggagcaacccaaatgtccattgatggatgaacagacaaaatgtggtatatacatacaatgaaatattattcagctttaaaagaggaggaagttctgaaacaatgtacaaaatgatgaacctttaggacatatgttaagtgaaataaagtcatacagatacaaatactgaatgattccacttatatgaagtacctagattagtcaaaatcatagagaaagaaagtagaatgaaggctgcttggagttgggggagaggaaaatgggaaattattttttaatgagcacagagtttcagttttgcaaaatgaaaaaagttctgcagatggcggggatggttgcacagcaatataaatttatttaattccactgaactttgtatttaaaaatggttatgaacataaattttatattgtgtgtatttgaccacaatgtttaaaaataaaaaagtgtcagtttaagtgtagttgcttaaaaaaatttaaaagcagagaaaatttaactgataagaagctgtatcaacatcaataactaactagaaactaatctgaaaatcttttcagagcccttatcatacagattaaggtatatattgagatacaccattgcatatataatcatatttcctgttatatgatgatatatgatgtaacgttgattggttttgctttggtaacattttctggagatgttgaaaggagctgcatacaataaactttattcaaatttttttttttctgttgcagatccgtggccgttcacatggtttcaaggcacaatgagactcactggcccttggaaactttggctttggatgtcaatatttctgcttcctgcttccacttccgtgaccgttagggacaagacaggtatccaggccaactctttgcctaatcaccaaatgttatttatagcctttaagtcattaaaacaaatcttgttaagattgaaaaggccatagattaatgtactataacagaataaattacaattcattgctttcttccattgatcttcccatgatgcacaataggaattcctaaaattacctcatttttttcatacgcatagtatattagtctatgtttcctttcatcttcaatatttacaagtatacatacatgcatgtgtgcctctgtgtgtatatatgacattatgtatctttccctttcctcttcaataattattcaagttataagtatggaaactcattactaattaggattaacaaggacatatctaatcttaattaggaaaaagtgaaaaatcggataggaggtataaaaggaaatgtagtttaattatatgttcattttgtagtatctcagatgaggcaaacaaaaggttgacagatctttagagcaccttttgaactaaatagacaatatttgcaattattaaatgtatcagtcttttcataaatatttccaaaaggcttaagggcaatttgaaatatttaccttcatctctgcttttttaaattgattatgtggttaatttggaagacttttcttgaacattgagtgtgtataagttacttagctaaatgcaattcatattacaaggttgaattaggcacattggagaagccatttgctagggaaagagaaacttcatctctcctatgcaaacgatcacatataatgtattctgatgataatcacatatgattatgtactctgagactgtattattgtgcctattgttttgaatattttttcaataatttttgctaaacaagtataaacccactctagagagacttttgagtttgaggcacacataaaatataattactcataaagatctaacacatcgtagtctttcagagtgttatgtaagtctttatgattttttattatttggcagaaggtgcatttcctaaaataattcacatgaaagtttgaatattctgttattgtacaaaagacatcctgtggctgtcatacaatttgggggggaaactctttcttcagtgagaaattaatcagctgtgactcatggcaactacaactatgtaaaaaaggaaaagagatgttagagcagcggagtttattctgatacgatttctactcttctgaatttgtcttttttgtaaagaaatatagtaggtaatgtgctttgcaatttaatctgatatgacaggacttttttagttagaaggaagaatgaatctttggttgaatagggacagtttttaggcacatgctagtgggtagtaaatgttcttgatgatagcaaggatttgaaggacctaaataaatggttctccaattttaacatgaaaaagaatcacctgacgtatttgattcctgagacctcctatcgcatattcccattttgcaggtcgtactggggtgggatttggtaatttacatctttaacaagctccacagatgaatctaatgcaggattatctgaggaaaactcttagagaaacacttacctttgggataattaacagacattttggttttcttttttcttttcacctggttaccttgcattttatgcaccattttatgccaaggttacctttttttgttattttattttattgtttgcttttagtaactttttaaaattgtgataagaacacttaacatgaagtctgccctcttaacaaatttttaagtgtataacacagtactgttaattataaacacggtactatacagcagatgtctagaacgtaatcatcttgcataactaacacttccccatcttgggattcccctgaatgtttgcttttgtagctctagtatctcaactctttaatcaggttacatgatgtataggactaccaaaatgcatatattctgatccaatttacttcgctgaattaatcttttgaaagattttcccaacaatgtgaattcaaaattaatctgaaccctaacaagattcacttaacatgaagcattaagggaaattaataaaagaaaaaattacgtttgtttttatcatgctatttggtagagggtgttcgtaaagcaacacgtactgaatgtgtgatggaaattgcttaacttcaagtatcatttgcattaattgaaaatgtcagcacagcactatcaaagggattgttgaagaagatgacaagctgggcatggcctggaaggagacccttcttgtgtcttgtgtatctggttcacagcgcaaggttccctttttagtttcctcatgtgcagacctgcgcgtgtggtcactaaccatttaccggagggaagtgattacatctaaaaataaaatataacaaatctgagagagagtctagggtttcagggctggagtctgtgaagttgtcaacagtttactattaaacctaaatatatgacagatagattggaccttttaattgctgtaccttaactctatggtatgttaaatagttacctggaattgtcacagttgggacagaatttaagagtaatatggagagattcaataataacttgaattttaaaattttgaaggtattaggaattcagtcatttcatattctttcgtcaatttgcctattgagatcatgggataagatatatttgtttattttcccactgcaaatgaacttccatttgaatgtggcagtttcagctcagttacttgtcaaaagaaggtggggaagagaattgtgttaaaatatatacaatgctagaaaatctcaaaacttgctttaattagttgcttaaaactctttcctctaatatagactatgtatcaaataattaaagtttcatctactttctttaatctgttctaaggcaaaagtactatatcatcataaaaagcaataagaaacagaaaaccagagtttaaaaaaacaggctaaataaatagaaatgacagaatgctttttaaataacacattttcctttcattatgataaatcttcagtttaagtgtccagattgacttgattataaatttaaatttaggcctgtaactattcatataagcccttctaaggtagttttctattaattacaaggaattacaaggaaaaaaacctattattccaaaatgtggcttttactagttggcaaacacttcacgcttaaactcagagtaaaatgtatgctgttatatagagaattttattttgtgtttttaagaaattcttgtgttcaacattggtaccatgtaaaaatccttcattgacaaatgtactttgtaactcctaaattttgaaagtggaggaaagcttcacaatgattagataaataatgtagcttctaactaggtattttcctttggaagaattggacatttaagcagaggcatgaaggcagtgtgagggcaaggcacgtgaacacctggaaagcagtcacttggtccccaggctctgaggcggcggcatgcttggcatgtggaagaaatagcaagaaaaactgggggactggagccaagtgaatgagggggaggaggtgtgagggtacatgctcctgagaaatgcatctgtgctttctgtgttgtcaaaatctgatttctaagcctgcaaggtcaaaggctagaccttggacactggtaaattcaccaaagcaataaatcctgtcctatgagacctcttggaagatggtcaacctttgccatgtaggacccttcccggatatcaggtggacaggcaggcttctgaatgtatgcccctcattacctcttggtagccttatgtcacagttaattgaatattgtcatattgtattattcataatacattgttattaaagtacagatgtgtggagatatgtgcattttagcaaagttaaaatataagttataacttgaccagacaaattatgttttctttccctgcaatcagcaaactggtgtataagtaatacaagaaccctcactaaactgcaaagagtataacagaactcgtttacatttattttgcacgatgactgtaactttgattttcccatttgtttttgtattacccaaggaatgacctcatcccctggcttttcctaaggccagaagcctctgtgtccagagagcaactagtccattttcagtctgagtattagcagtatacacagatctttcaggtattaaatcagttgaaaaaacaaaacattaaaataacggattttagctgatctgagcttcttagccattcgagaggagaaaaaaggaattcaacatactttcagggaataataataaaaaaaaagtgtaaaagagggatttcaacatacctatgattaatactgtattaaactgaagatttatatgaatgggtatagaaagtatcagacctggccgggctcggtggctcacacctgtaatcccagcactttgggaggccgaggcaggcggattgcctgaggtcaggagttcaagaccagcctggccagcatggtgaaatcctgtgtctactaaaaatataaaaattagctgtgcgtggtggcaggcacctataatcccagctacttgggaggctgaggcaggagaatcacttgaacccaggaggcagaggttgcagtgagccaagacaagatcacgccattgcactccagcctgggcgacagagcaagactttgtctcaaaaaaaaaaaaaaaagtatcagaccaatgagaggaaaaatgtttaacaaaagatgtgatgttatcttaagattagaatgcctagcaatacaataggaggtcaaaccagtaggataaaacagagattaaggggaaaagtgattttctgtgtgtgtgtgtttaagcacatgtttaaaactgagggtgggagcataatgcacttctactaaagaatgaagataatttcttaggtatgctattattttgtttaaaatatgtatttaagaagcaatgttcaatacagagggggaaaagttggttataggacacttgtgttttctttccactctaccattgagtggctggctttgtgatcttaactcctcttggatgactatgttcttaggttctcaggattctaatttttggaaggagaaggggtaaacatcttttttaaagtatgtattttctttgtaggtaatctagataaaataatgatatacccaaatatgatctagctgccttcctttggctcttttctctttttttttttttccagactgagtctcgctctgttgcccaagctggagtgcagtggcgcgatcttggctcactgcaacctccacctctgcctcccaggttcaagcgattctcctgcctcagcctcccaagtggatgggactataggcatgtgccaccacacctggctaattttttgtattttcagtagagatggggtttcaccatgttggtcaggctggtctcgaactcctgacctcaaatgatccacccaccttggcctcccaaagtgctgggattataggcgtgagccaccgcgctgggcccctttggctcttttcagtaccccccaccacctctgtaagttgcccaggtccttcaagccaaatcaggaggaaagtggggctgatagttattaacatcttagtatgaatttgttaaaaacatttgcctttgcttttgaaaaagatctgttaaggttctctaagcagtgcttcttttaaaaaaattataaatatttaaaaaataaattttattgtgtatatttgaggtctatagcatattatgggatggatataattaaatgactactgtagtgaacagaataacacacctatcacctcacgtagttacttatttttgtaatgagtggctaaatcttatttaatgaaaatctcaaatgcaatacaattttattgtattttgttagtccttatgttgcacattccatctctagatacatttatcctacatatctgctattttgtaccctttgaagtgcatttctccatttcctccctacctcacaccagtgataaatattcttttattctctatctctgtgtatttaagctcttttaaaaaatattccacatgtgagatcacacaatattttttttcctgtgtctggcttattttacttagcatactgtccttaaggtctatctatgctgtggaaaatggaaggattttctttttttaaggctgaataatattccattggataaaatgtctaaatgtaatcacaaaaccgtaaaactcccagaagcgatcatgggggaatagttccccaacattgaccttggcaatcatttttggatatcacatgaaaaatctcaggctacaaaagtggaagtaaataaatgggactaagtcaaactaaaacacttatacacagtgaaggaagcaatcaacaaaatgaaaagacaacctatgggctgggaaaaaataattgcaaactacttatctcatggttaatatacaaaatttataacgtatttttaaaactcaatatcagtaaaacaaataatctgatttaaaaatggacaaaggatcaaaatgcatatttctacaaaaaagagataaaaatgtccaacaggtatatgaaaaagtgatcaacattactaatcataaaggaaatgcaaattaaaccaccatgagacattaccttgtacctataaggatagctattatcaaaagacaagagataacacaaacgtggcaaggatatggagaaaagagaactctagcacactgttggtgggaatgtggattggtatagccattatggaaaacagtatggcggttctgaagaaattaaaaatagaaccaccatatgatccagcaacccctcttttgggtctacatccaaaaaagatgaaatccctaccttgtgaagatatatctgcacccccatattcattgcaacgttattcacaatagctaagacatggaaacaacctaaatgctcatggatggatgaatggaaaaagcagtgcgttttttttttgtgtgtggtgaaattttagtcattacttttgctatagtccagagagcctttgaaatgacacggtgctttgcctctgtctacttgacataatatttggatatttgagtcttttctgtagttcttcaaaatacatgcacatttactcaaaagtgctctttactttatattaaagtatgtattttaatacttaaagaaatgaacatatccaccttgtgatagctatttccactgccttgccatttttgtgtaatgaatccataatattcatgtattcagattattgtgccttaaatcttacacctaaataattaacatttagttttattttttttcagcttttcaccacaaagcacgtatgctaaagatatgaaatggcatttgatttttataaaggcttttagtgtagaaagactttcataaatgttgctagaaatgttgaattccattcatttcaaatgataggtttattactttgaaatcatcatatatttgctaagtcctcagaagaatttaaataagatatatactgtttccaacttggcaataagccaaccaaagtgtcataatggaaagcccctttctactatcttgagacttgttttgctaatcacctactggggcttccctacatacattgtgagtaatttaatcttatttattatggttacatagtcactcgtagtcattataaaaatataataagaatggagtttttttgagtttttcaagagtcatttttagcttaaattattttctcacagagatgctattttcctccttttgttgagatattacacacaccaaagttgacaaatcttagtgcacagtgcagtgaatttctatggatatatttatacccctgtgtaactactactcagacctaaatacacattctcaaaacccagaagccttctgtgtacctgctcctagttaacatttcaccaaggtagccactacactgacacagattagttgtataatctctagaatttcgtataaatggaattacacagtatgtattaatgttgcaggacttttccttagttcagctaaagatgagttccttgtcccatggccatgaaaattcaggctcacagacaacttgaatagtgagtaagacagggttttattgggtgaaaaggaaggaaagggggaaacaggaactctcactaggccagagtccctgctagagcacttcccaccaggctgattgaatcccaggttccacacaggaaagaggatgggccaggctcctcccgctaaaaagggtgtgaagttcccaaggctccatctcagtgggcagcctggttggaatttctccaaggaccccctctcacctggctgtctcattcctccctctaaagaagtacatctaattgctcttagattaaggataaggatgaagaccaatcttaacttcttcctgctgacagggtgtgctgttttggggaaatggcaggtggagctccctcagaggcctatctaaggtttcccagcagaaagggccattgtcagaggttccagttgcattaccgtttagagtttgatggcctgaaggcaagaacagacaaagccggttattagaaaacacgtatcaaaatgaaacaaggggagggataaggcagctcaaaaattccaaggccttttaccagtttgcacagggagacggaggccaaacacccaactagcaaaaaaaaactttactcttttgccagcatgttgggcttctgggtttccttccccagagtccaatcctaagccaactagtttaaggtttgggaaattaactctttctagtttgaaggatgcatttaaggggactgtcctctagtacaaagacacaattacctatcagtgaagagaggacagaggagaagaaaggaaaaaaaaaaagagagagcacctgtaatcccatcactttgggaggctgagatgggcagattgcctgagggtcaggagttggagaccagtctggccaacatggtgaaacccatgtatactaaaattacaaaaaaattagccgggcgtggtggcttgtgcctgtaatcccagctactcaggaggctgagtcaggggaattgcttgagttgcagtaagctgagatagcgccactgcactccatcctggtcgacagagtgagactctagctcaaaaaaaaaaaaaaaaaagcagtgttcccattttttcttgtttattcacacttctgtattatttttgttttattcttgtccagtgttactttacctttttttgttaactggtgttctttttcccaacctgatatacttgatattcctttgtcagatgtattggcaaagtaggatgtgtacaggggggctgaggggaactagtaacaaggaaacaaagagcctttatttttttaagaagccttttttaaaaaatgcaaaatgcctaaaggctcttgttttgattcgtttatgaaaggaaaacaaaccagttctgtatctatggtatattgttgctctttatcttccccaactctaaccttgaggaaagaactgccatgagctttgtcactatttgtaaagaaaattatttttcttaacgtatgttggagaagactgctaaatagaacttgtatcagactagacagattttaatcgtgactttacatgcaataatgataataatttcatgtatgataattctgaagatatgaagaaataggaaaaccaaagcaggaaaaatggacaagtgatatgttacaatttctcaggagacaccacttgctcccgttctctttttatctcactcactatgtgatctcatctctcctgtggttttgagaggtgaagccaactggacttcctgggtcaagtggggacttggagaacttttctgtctagctaaaggatgataaatgcaccaatcagcactctgtaaaaatgcactaatctgcgctctatgtctagctaaaggattgtaaacgcaccaatcagcactctgtaaaaatgtaccaatcagcgctgtgtctagctaaaggactgtaaatgcaccaatcagcgctctgtgtctagctaaaggattgtaaatacaccaatcagctatctgtaaaaacgcaccaatcagcgctctgtgtctaaaggattgtaaacacaccaatcagcactctgtaaaatggaccaatcagcactctgtaaaatggaccaatcagcaggatgtgggtggggaaaaataagggaataaaagctggccaccccagccagcagtggcaacctggtggggtccccttccacactgtggaagctttgttcttttactcttcacagtaaatctcgctgctgctcactctttgggtccacaccacctttaagagctgtaacacttgccgcgaaggtccacggcttcattcttgaagtcaacgagaccacaaacccaccagaaggaagaaaccctggacacatcggaaggaacaaactccagacacaccatctttaagagctgtaacactcactgtgaaggtctgcagcttcattcttgaagtcagcgagaccaagaacccactggaaggaaccaactccggacacagttttacataggatttatatgtcagtcactcccaaatgtacttcacagccctcacctctcttttgaattccattcctaactgtctatttgataactccattgtttcaatttcttaatggcatgtcagatttaacacttctaatttctcctctttcccactacagattaacttacgccttgccaagttttcttttatttttctagtgggatttatttcagtcaactaatctccctcctccctacattcaatcccttatcatctcctgttggttcttgtatctctcaattccttcccatgaaattgaagatgttttccattttcagtgtcatctctagtccaagctaccatcatatctggcatcacagagtatggcagtatgactaagtttaccaggtaaaatacagatgcccagttaaatttgaagtttaaacaataaataattttttagtataagtatgttccaaatattgcgtgggacatacttgtactaaaaatatttttatttatctgacattcacatttaactgggaatcctgtattttattagctatgtttggtaattttatatatgtgagggagaagaggttatttattacacagagtggtcagggaaggctgccctccaacctcactgggcaggctggttggagtttctccaaggaccccctcccacctggctgactcattcctccctctaaaaaagtacatctaattgccattacattaaggataaggatgaagactgatctcaacttcttcctgctgacaggggttgctgttttggggaaacggaagtcggagctccttcagaggcctatctaagggttcctagcagaaggggccattgtcagaggctccagttgcatgaccatttggagtttgatggcctgaaggcaagaacagacaaacccatttgttagaaaacacatatcaacatgaaacaaggggagggataaggacagctcaaaaattccaaggccttttaccagtttgcacagggagagggaggccaaacacccagctagcaaaaaaaaaaaaaaaaactttacccttttgctagtatgttgggcttctgggttccttttccctgagcccaatcctaaaccaactagttttaaggtttgggaaattaactctttctagtttgaaggatgcatctgaggggaccttcccatagtacagagacacaattacctatcagtgaagagaggacagatgagaagaaaggaaaataagagggcaccttttaaaggagtcccagggattcaggatgcatttgaaaggggtacagactaaagatgaatggctacccatctagaatgaggggagcaggcatgcctggttttcttctcttcctagcagatacgtggggtacatgagggagagagggaagaatgtcctctttccctcttccatccttgcatccccaagtcacagcgaccttggcagctgccgccatgagtgccaaagtgactttcacccataaaacaggaaggacctagagaataggaattatccactctcacctatgcctctatcctccaaactgtcagtagctttggagttccctacacctcatttatgccatggatattaatgtggccttcatccatgaaacaggaagctaggggttggcttaatcagcaggaatcagccacacatgctcacctgcactgtaccttttaacttccattattgtctgcctctggatccctaagatccatttttctatcctagggctttgaccagaagcttagaattgagtctgggatgaaaatttgtcttgagggagttgcatggactccttatcataagctgaatgctaagttaaaactgtggaactgagtcctcctccaacaagggaggggaaaggatgtcttgtgagacacccagataactggtagctatagttatgcttgctaagatttgggtgcatggtacttggctttggttagctttcttggtcttactttcccaaaaaggaaacctccgagtggtgggtatcctatttatcccaactgcctggcaggatttgcaggataattgctcagaactagaatattgatccagatttctacattacccatcccttttgttctttctgagctgcagctggagactgctggttggttcacaggaacaagcagggttagcctaaaatgtaagcgaaaacttaaaaacaactagtgagtttagaatttaatgacaaatatatgatacgttttgaaacatgatttctctctctccagtcctcatttttattaaaaaacaaatcatcataggactgagtggtttgcaaaatagactttacttttatacttggcctgattatttgcaaaaatacagcaagtataattatttttacataggttttttggattggctttgatggaactctgttccccaaggaatctcagataagatcttttaaagctgagcccagccatgggtttatcctcaaatacctgtaagttgagtgatcctctcctcttaaggtcccataataaacttggagctcctagatctgttagaaagtgacattctttactgaccacaggtcaggaaccctgtacaggaactgtgtagacaagggtatgaggcaactgggcttctatcatccctgcaagttgagattgactccttaaagggaagcatacccttccagtctaagccttggtaaaacaaccactttctccaattgtgtcctgccacaaaagaaaaatggattcttattccactgatgcaaacggctatattaccataagttgaggatactcactgagagtttccaaattctataggaaccaggaagagagaaacaaacgtgctacaaattttgttcataggagtataccttactcaattattaaaggccgtaaaaggttcaaaataaatttcttcgactatgaaaacccaaacaaggatcagcaatattccaaccaaaagtcaaataagttgcttcagctttctgagttcagtccatttagttaactcttgttttgcttgatattcgtgaatgtttcagcttttcatgagtcctgtactattttcctttattccaaaggttacaatttctaaagctatcataaacctatatttcagagcacctgttacagttctatagcttattagaaaccatcttttgaaaaggattaaaataggacaacaattgtctgtgaatagcaaaatgtccagggtaattacagttagaaacacaattgacaaaaaagtttggttatctccctaatggtttacagtaacttaaaatagcaactaaggactaagctctgatttttatcttgcccagattcctttctaaggagtctggggagtcatgccctacaaaccataaattctcatcagatgggttttatttaaccctgtatattgtgacttactttccaatctgactgtggcataacaaggaagaaaattacaatgttttaccccaaagtatatttccttgccataccttgaaattgccctgcaaaatctcttgtgggaaaagtccacattctatagaaaattctttctcctttgttttctttcctttgtttccagatccaagagataatcaactaacagccaggtacccttttaggtctgataaacattttacaactctgcaatctgagagattcctctgcacaataaaacttggtctccacaatcctttatcttagcctgaacattcttttccattgatcccaggtcttcagataaactcaaccaattgtcaaccagaaaatgtttaaatttacctatagtctggaagcaccacccccgccccccactttaagttgtcccacctttctgaaccaaaccaatgtatttcttaaatgtatttgattgatgtctcatgcctctctaaaaatatataaaaccaagctgtacccctaccaccttgggcacatgttctcaagacctcctgagggctgtgtcacaggccacggtcactcatatttggctgagaataaatctctgaaaatattttatggaatttgactcttttcatcgacagtagtttcaattatgtgttataatagtaattcctagcatctttaactttaagataaaacttggtaagttgctttgtgtgctaactgcagccaaggtttgctttcttcattaagggcctggttattccatatgtccccaggccttaatagttgtgaagccagcaagtcaaatagttctcaaaacccaaaaagcagtttgtaaccttaaaacacttagcaaaccttgcatctgatctgcagtttaccaataatctctaaggcttttttaatttctcaaagattaaagtcatgtgaactaaaaggtactacagattttatattccctttaaaaaatatttgatctaagcacttgtctttctttaggccaaattaattagagctcttttgacaggcattaaacacagtacatagacatgcagaagaaaacccagtcgctgggtggggccctttaaaggacaggcctgggaaaacatgcagatatcaaaccagaaagaaacttattccctaaggcaggattgctaaacaaagccttgccaagcagttacaggccatgcccccaggatgtaaaacaagatgaggcttgcagcacaaaccacacagacatgcaaagcacaccagattggccacagcccaagactagccccacaaatcctgtttcacaattaagctttacagaaaaaataaacagtgatggttgggggatctggcctagcaaagggggaaaatatctttaaggcttaactgctgatggagtggagaggaggaaagaaaaaacattttttaatgcttgaggaagaacctcttattcttatacaactgattcctccaccagggagaaaagattaagcttaattactgtccaaaagagttaaacccgttagccagggaagaggaaggctgtggcagcagtctgtggctgggaaccagtcagctggctgtgggggacttttgagccatgcgtcctagcactgcgtagggtgtggggatcggcatggagctgctgctcaccagtctgtcctgaaaaaggaaaaaaaaggccatgaaaagtctcccgaccccaaggagcgacagagggtggtggggtggtttcccataagctcagaagtccaaggacgaaaaggcttagaaagccacagtgagaggttttgtgttctcatttcactcaccacttcttgagctcccacattgaacaccaaaaatgtcgcaggacttttccttagtgcagctaaagatggtgttctttgtcccatggccatgaaaattcaggcttgcagacaatttgaatggtgagtaagacagggttttattgggtgaaaaggaaggaaaggcagaaacagggactctgtctaggccagagtccctgctagagcacttcccgccagactgttcaaatctcatgttccacacaggaagaggaagggccagggtcctccccactgcaaagagtgtgagcttcccaaggctccacctcagtgggcgggctggttggagtttctccagggaccccctcccacttggctgtctcgttaatattttttgggtgaatgacatttttctatttaatattatatctgtgagatttatctagttgttgcatgtatcaatagttcattcttttttatggctatacagtttttcattgtatatgccacaatttaattatcttgctccttcttgttgataaacattttggttgtttctggttttagactattatgtgtaacgctgccattaatattcttgtctaaaagggccatctacacttattttttggtactcctttctcctggttcattgaattttcaagtcatacagttcatatatatttagctttagtaaatactgccaaacagttttctaaagtgtactaatttccattctcataagcaatgtagaagaggttttgttgctccacatcctcatcaacgcttgactgccatgaatattcttgcctaaaagggccattacacccattttggggcactcctttctcttgcttcattgaattttcaagtcatacagttcatatatatttagctttagtaaatactgccaaacaggccgggcgcggtggctcacgcctgtaatcccagcactttgggaggccgaggcgggtggatcatgaggtcaggagatcgagaccatcctggctaacaaggtgaaaccccgtctctactaaaaatacaaaaaattagccgggcgcggtggcgggtgcctgtagtcccagctactctggaggctgaggcaggagaatggcgtgaacccgggaggcggagcttgcagtgagccgagattgcgccactgcagtccgcagtccggcctgggcgacagagcgagactccgtctcaaaaaaaaaaaaaaaaaaaaaaaaaaatactgccaaacagttttctgaagtgtactaatttccactcctacaagcaatgtagaatagtttttgttgctccatatcctcatcaacacttggcatcttcagtgctttaattttagccatttagtgatatctcactgtggtttcactttgcatttccttgataactaatgatgttgagcaccttctcatatgtgggttgaacatttggatattctcttttttgaagtgtttaaatctttttgcacatttttagaataagattttcaagctttttttgttattgatttctgagagttcattgtatattctagaaatgatactttattgcatatttggactggaggtaacttctcctaatttatggcttgactttttactcttttagtgttgccttttgagtaaagatgttaattttaatgaagttcaacttagcaatctcttcttttgtgattaatggtttctgtgttcttttcaagacatctttgctatcccaagttcatgaagactttgttgtcttgtggatgctttactgttttacctttcatatttatttctatgattatctttagttagtttttgtgcatggtgtgaaataaggttcaacattcagtgtttttctgtatggatattctgttgacccagcaccgtttagtaaaatgaccatccatttcccactgaatcaagtggcctttctgtggtaaataaggagaccatacgttttgggttatgtttgtgtttttccatatgtgtaccaaccccacagtataaaaaaatttatatctgatagtttaaagttctctagcttattcttctttaattttgccttttactattttagcttgttttctgtagtttcatgtaaatttgagaatcagcttgtcagttttacacacacacacacacacacacacacacaccccatactgttgggattttaattggcattgctctgaatctagagataaaaccaagaactaacatcttaacaattttaagtcttgcattctaagcattttgtttatcccttcagttatttaggtctttaatttctctcaggcatgttttatagattttagtgttcagatcttgaatgaggtgcttgggttttataaaagtgactattaatccgaatcattaattggtaatgtttacaaaatctctaataattttactattatttagagcctgcaattgtattaagagttctgagatagcaattttccatattagctaagtaatatctaaaagtactcagtgctataatttcacttactttacaaattgtgttcaaaatgttttttgcagtatatttgcttcttatttttaaatttgattaagtggtagcattatttagaatctgatttattttctggttaaatatattaagatgataccctctcaccatgcctgaggtctgtgatatatttgttaaatgaagggggaactggtgaatcggcaatttcaatttggttttaagtagtttatctcctctctatattaaaaacttcttagttattaaacccaaacatcaattttagacatagagaattaaagttgtgattgcatgatgccaaaatatttaatcaatttagtttaaaatgttaaactaatggtcttaactgtccagttgtacagttatcttggcacaattcaaaaattggctgtaattttgtctgaattaactgaattagcctgattcaatttaaacatgtcctaagacgttgaaaaattggtgtgtgcatatccattactgtattagtgtgtagtggtagtattaaacatgtacattcactgagttgagactatcttttatttctttgaatatcactaagtgctgtagcacataagtacactttctcaatgattttatttctttttttaaaattataggccacttttgtatggtagagatctttgctttttaaattttattttagtaacttccatatatgttgcctttagtttttaaagtttcatatcagccaacaccaaaacttgaattaaagttgtgataaaatatagtagtagttcacttgttttactattgtactttgaatacgaaagtttaacgatgttaaaactagcttatttccaaatgtcaaggatacataaagtgttcaaataatagttataataataatggctaacactaacaagtattcactgtgaaccaagcagtgttcttagcactctacataagtaaccacatgtaaccctcacaaaaacactgaggtggttaatgttcttatcctcattttacagaaatttaataaatggtttaatttatttccattttatcttaagtttctgattgtactgtgtaattaaaattcatacataatgcaaatcctctatgctttttttctttttaaatagaagagtcatgccctatcctgagaatagagggacatcagctgacatatgacaacataaacaaacttgaagtttcaggtaggcaatataatcctttgcaaagtaatattttatgtaaaattatcaccaaatgctagatatggaatacattataggtgaatctttgatactgcaatttaagatcatagcattaacgtgaaaattttaagaattctttttaatttttttttttttttttgagacagggtctcactctgtcactcaggctggagtgcagtggtgtgatctcagcttgctgcaacctccacctcctgggtacgagcaattctcctgcctcagcctcccaagtagctgggactacaggcacatggctattttttgtatttttggtagagatggggttttaccatgttagccaggctggtctcgagctcctggcctcaagtgatccatctgccttggcctcccacagtgctgggattgcaggcgtgagccaccatgcccgacccataaaaatttaaggtagatgatgtagaaaaaattccgaaagcagggttctatatgtttaatctgtgatcaacaatacctcaacctcttggagaaaaaaaaacttatttaaaattataaaagtgtccattgtagaaattttggaagaagaaaaaaaaatttgtgagaaggaagatgtcaccacccagataaagacaagattaccattttggtaatccttgttatctttccttttggtaatctttcttatctttctttctccttcttttcctcctccttctcttctctctctcccacataaatgctaatgagtgtgtgacacacacacagttataattcttatattacatttcatgtgtatgcatttcctgtcatcaatacacatttctttaaagcataattttgtaaaaggctgcttagatttaaactgaatggctgtactatttttaatctaattttctaactttagacatgagagctgctgcaatgagttactctaatttttacttaagataattcctaggtcaaaggaaattaaaattgagtttttttgaaatatattcatgatttttttctagaaaaatggctacacgttctatatgcaaagtgaatttcattctcttttaccctaaaaggagaaaaataaaatcaagaaattttgctgatcccaagcagcaagatttcgtttgaagtgaatcaattaatagataagggcaacacaaaattctgtttagaaattaacatttctattagtttattaaattgaatcatctgttacattttacaggttttgatctaggagacagcttttctctaagacgtgcattttgtgaaagtgataaaacctgtttcaaattgggaagtgcacttcttattagagacactatgtaagtaaaaaattattttctttatgtttaataatacttcataaattattttctaaagagatttcaaataatttgttttaaaaataaagtttctcaatagcatcatcctcactggaatgcagtggtaaacgtgttgttaatgtatttgttgtttataaaaatcattgcaatctaatcttggctctacagtgtaaatatcatttatatgtacagaaaaaggcacgatcattagagaacagtaattaaatccatttctgaagaaatattgtttatgtttaaagtagacataaccaatattaggtttttcaaggtaaacattaaaacataaggcactatatagattcagagccaaaagactgatatttattgtataaatttttagattttctatgcttcttaagttaaaataaaagaatttagctcttaggtgttcatcttatctattgtatagagtacatagtaaataaaaagctgttttgtgcttttatttttggtcttgatactcatttaattttaaaatagatttaccaaagttttcccttactttttctttcttttttctacagatacacttagagttacaaaaaaaaaatcactttccattcaaatagtgacaattggtcagcaaccatacagggcaacaatgatttaccatatagttggcaataattaaaggatgacttcatagtaattcagaaagctgagttatcaggcaggcaggtagcacatatggtcaggataattattcctggagtccaagatgaatattcgcatgtatgaatataccgcaataaaaaccctcaaaattctacttagcttcatatgcaacacaaatgtttttgtgtgaaaatatgtatgtatgttttcccttcctgggcagtagcctaatatttaagacagacaagattgtggagaatctcaaaatttgaattcttaaagggaaatagcattaatcatctcattgcccttgctcagacgttctgtgtaaatgaggttcataacctacactttttccctgagaaaagtttcttttaaacctattttgtgatacttttggtaattttcatttaatgactgaaatggctccttaaaagtaaactgctcaatacttggtaagaaacaagaatattaaggaaggaatttcaaatcaggggatataatgggtggttgttaggtgggacacttcagcagatgtaactgtatggacccacgctacagctgccgctgtttgggtggtctcataagtaggcattaaattctcagggtacagcagttccatgcttaggtatgcataagccataaagaaaagatgagaggcgcaatatttctcacatgtatatatttagatgtttcttaactaggagtagataactttaattaataaatttaagaaaggcaatacattctgtttaaaaattaagatgcattttctctccccatcttctttcggatttaaacccctgtaatgctggccagatggcaaaaggattttggcaaaaggagtgaaaccttttaaaattcattggattacatgtgagaagacttagctaattttacgtagctacactggaaaacttgctgcgacatttagacaatgctatttctttttaaatttatgtgattataaatattaggcaagacttggaatttgttttctgaattttgggttctaaatcactgcccaatccatgggtaatcaatgtaagtgaattctctggttctgtggagcagaacctggtacctccactataggaaaccgggggtatctggttgagctgcccagtgagtatcaagtagcttggctcatttccacttacatttcacttgttgagccaagtatgctaggatgcttctcttgcatgatgccattttgatttttcaatgagactggagtaaagttgtagctatttatatatttgtaaataagctgctttgcagagtcagcatgggaaaaggcagattctattttatatggaaaatggggatgctttctgtgcctgagcttccttttattgttctggcatatcccaggtgaggttcgtgagaggagagacctaatgagtatgttggtctgatacctgttaggcatattcaatgccttgagccttgcttaatgtaaaactcccaaagaccgcttttgcaggggccttccagatagacatctgtcaggtccacaacccaggtactaacaagggtaaatcgtgagtctcaggcaaaatacaagtcaccttttatctctggataacaacgcagtaaccaagagcttctgccctgggcaatagtatcacaccttatcagttgcccatggttcttttgggtcctgtacctgtgctaaagttatagggaagcttatgagaggccacacagacagcatatatgttccctggaggagggtcccttccctggccattcccctaccaacggttaattgtggaggccacactttaaatttccaaggagtaacttggaaattatactgcactctcacgccagggggccacaatagccaaccatctacggtgaggggcttggagggtccatggccaacaccaggtttttttgttattgttcccctacttttaggggtgttggggcaggcaataacagattactgttcatccccgtacctggctggagaaggtcatccttcctgtcatagatctggccacatggcctggccctacatgggtcagtgactaactagctaattctataactttcaggtaatgaaccacaaggtttagccttgataaactgcccagcatcggttcagattaccacaggtgtcacctctttggtgatcactatctacactgccttgagttcaacttattaactactttatctacacctggttttaaaccatatgttgtcagtgttaggctggactgcggcagcaatcaaggcagcagcagtcctctggctagacctatctgtataccatgccccatcaggagtggtgggggtgcctcaggctccatggccttatcttgcattaggcctataggcttcaagacctcttgtaaatctgtgctaagggacttgtactcagcatacttcactgctgcaagtaggggccccacttcgctaaagtggatgtctgcaccttccctatccagggggttgttacccatgaatgtacctaccacactgttgggtacactctgcatgatgactatatcccaatctgccatgcttttatgagcctgaagggcagcatacgcacttactaactgcttcccagtccggggggttgttatccataaatgcacccatcctgctattactaactgcttttctatcaaggaataccagagctcagctcccttccatagctgggaccaaaagcctactgatattctcaggtgctccgtgcactgccataggccctaactgaaactatctgtggtcacatgcacatctagcttaaatgggcacctcttgtcaactacctgtagggcttatgcctgctaattagcctgcttggctaccaggaagactgtctcagcagcatcataccaatcctaggcaaggggagcattgccgcttctaaatctgcaagagaatcagaggttaacataacatcattaataagatcatgacacatggtggggctatgtatatagccccgcagcaacactgtgaaagtccattgtcaacctcccatcaaggcaaactgatggccttctgcctccttgagggctgccatagcagtagtcacttcatgtaggcagtgccccacatatggggtgagaacagcagctagagagccaaaatcactcgggggcactgagcccagcacaagatccctcatgtgggagggaaagcgttcatcatctggcccccaggtattcagatcaaatggtctgctctatacccatcttccagagtatttgcacaaaatgagtatatgatcgccatttactcacagtttctagtatctctccagcatcattccaaacagtccatattgctgccattagccactcgattaatgtgtgttcaccatgcccttgtgccaaccatcggcacagatacagccactgacgaagggaggggtgagttgtgataaaagccagcttttccatctcagaggtggagcaagaaatgctgccagcctccttgtcccaaagacagagtggccaggcagggaggggcactgggtgctgctgacactgttacctaactctcacaactcagtgggtgtataagcactataagaggtgtgttccactactgtggggggttccagggctctccactgggttcccatcagatggtcatgttgtaccttttgacagatcatagggtgagcctgcagtggtggagccccctcctcctcaggatcagaccaaatgggactgtccagcctggaggacaggctcaaggtcacacttacagctgttgctaactcttgttccaggctgtttatctgggcctccaagtgccctgcttgcacctgaaggtccctcacccccggttctgctacaagctgtgcacttgggtccctaggcacacggcttgtgctgggatgtcccttacctgtggcactgagcatgtatttcacacagtgcagtcagaaatgcccatccaactctgctggtggaggtgcgttccttctcggtgctgcgtgcttccagctgcctcggtgctttctccacactcacaggagacctatccactgcctcccacatttccattggggcccatccaagcagcaccactgacaccaggtaccacagcccatgctgcagccacagagccaacccgggagccttcaggggccaaagacccactcaccttatcctgccaactatgccaattgtcaggtccatgactacgccagatgttatgctggggtcaggttccagctcatgctgagatctgaagggagtgggtgggtgagcagagagctaaaagaacacttggagggctgtaggcaggtgaaaggtagttttattcagcagctctctcaacagcagcttacacacactaggtctctcaaactgttcgctctgtcttggctgcttcatccggtggctcccacacacagctacatggacagctctcccttcagggtcagcagcttaactgtttctctctctgggcatgagtgagctgagccgtgtcctggctccccgctgttcatctgcaaagatggacagctttgactctctgtttctctgggcgcaagtgcacttgtacagtgtcagcagggcaattatacctttcacagacaatagtggcgtagggccaagggatggccttcccatgttatggctacatggttttgataacaagaggagttatacgcctgtgctctaaactcactgagtcactctggatgtttacctcggcctatccttgaccaaagcacagccgtgttccttacaacatcattgtacacttagaggtggcacaggctcaggggatatttgaggggctttatgtgttttgttggctttaaattcatgtccattcttcagtatttatgggatagcaaatggtaagtatttgggggctttagaagattctgggtggcatgctacctagttctctagaattatttgtttagaggaaattttcttggcttcttatatctccaagtatccctagttatttaaaagagataattcattatttgtatacatattgagagctatagcaaagaagattatattttgattattttaaaattgtgttttggcagttatcaggggaaattggtaaaatactgagtaaaaacagataaaaacacacacaaacacacatactatagagtaccttattttcttggcataatgtagtctctatctagcttccattagttgcttcaatagaaaattcaaataaaatgtcttagtattgaatattttagatgaatgttgaatttctacatgctgttggttctgaaggagcaacacactcagcttgactggccgatgaagaaattgatttcaaatgtaccaaggaagtgagttttctgattcattgtttaattcaagtatggtaaagagccttatcccttaggctcttgatagctactggctgtctggaatgctatgttgagaaggattctggagccatagtgggtttaaagtgctgtgacccattaaaaaaaagagggagggaggagtgagcatatgtgttccatatctatagcctctctgaattaggatgatttctgtaagctggtggcttttgcaattgaagcagtgtctaagaatgaggggaaatgaggctacgtgtgaaaaaataacacagattaaatttaatacgatttatgagcttgaataatatagctagacacagtgacataaatgacatatatgatccccttagtatttgttacaaataaataaatctctagtgaaagggagtcttctttatctgtgtctctgtatctctctcattcaattggtgtctactttatgaaagtaaagataatttagtttcatagctttatgtgaaaataagaggtagctggtaggagctattctaaattatgtttatggatttacaaacataataatctttagcaagtaggaaacccaaactacaaatttggaagatgtgtaatgtttttcagaaatatttgaactctggactttaacagttcccttgaaaataatccaaaatatggacaaaactgtcatatgtgttgtaacatgatgtttaccttgtcttttctattgttgaatgatttatcccatgggactaccttttctacacggacctttacactatcttcagattattattattattatttttttttttttttttttttgagacggagtctccaaaaaaacagagtctccagctctgttgcccaggctggagtgcagtggcaccatctcggctcactgcaacctccacctcccggtttcaaacgattctcctgcctcagcctcctgagtagctgggattacaggtgcgtgccaccactcctggctaatttttgtatttttagtagagacagggtttcaccatgtcagccaggctggtctcaaactcctgacctcaggtgatccacccgcctcggccccccaaagtgctgggattacaggcatgagccactgcgcccggctgatttttatcattataaataacactacaacatacaagaaagttgtttttttctgtatttaggattattttcatacaattgacttttagaaataaaattacttgttcatatttagggatcttgatatatactactaattatgttcaatcattgttttctccatgtattctgcatattttccaatatcttctgtagcactaggaattatcatgttaagattttgtgttttatttaacttaaaacttgtgcagttacaaatagaagctgtagtttactgtataattttcacagaagttcctaaaatgtttctgttttgctaaagggtgaataagaggtagcattcggtaagtcactgaaatgaatgcagtctagtctagagcttatccttttactcagcaagcatttgttgagtgtcaccatgggccaggcactttgctaggttctgagcttacattgataaaagaatgtggatctagtctttccttcctggaacctgctagaaagatacacagtgcaaggaaaagctacacttcccccttgctttgccttcatagaaggcaactgagatgtattgccttctattgttcaagcttagactgcatgactcaaatttcaccccttataaaggctaaacttccttaagcatcatgcacaaggctaattttcaatgttttcattccttgcctcttaagggactattttgagggactattttgtaatgcatagttctcctttgagtcctctccaagttctcaaaacaaattcagaggctgaaaacttgttcagaactctgatatcgaagtgtctccttgctgagtgttttagaaggattactttacaattccattaagctctagagaatgcctatttatgcatcccttgggttttcatttggggcattccttcattgtgtagataggaattttcctatataaggataggtgacttagttacaaagttgtccagctgtttttatgagattgtatgactgttatacatgattatgtcatcactgtatttccttcattgcagtttggcataccaagaatctgaggttagtcattaagtcatactttttttaaatggaaagaacatatacaaatatttactactcaatagtcaaaagcacctattttattttttctagaaaattcagaattgttaataggcagcaataaatttcttagtatagaaatagctattaagatgtaatgtaatatgaaatattattagttcagtattgttatttactgattttggaaacatttgatgttatcattatcaaatttaagtaagttgtgattttgctctttcagatttcatataactcagtattgggaaaagtagaacatatcagtaattaatcatatgtgtataaattctacaacattcatatgacttaaagttttttcttggacttgaccattcatttattagccagagagaaataagtttgtttaaaaggtacagaaatgttttaagtttaatgtctatttgtggacattagtagataaaatcttataaaattaaaatatttttgtgtttcacatgagttaaaatggaaaaaccataaatctatttatacatttaagaaactaaagttcctatagtaagaaacaataatgtcactattattgccttcaaagaatgtattcttaacaattaaattacccaaaaaagcctcacataaaatggaatgaaagtgagaagctgcaattcatttacaaacttatccattttctagcctcaaatgtacataaactttctaaggaaaagagggtaggttctcatttctgaggaaaaaaggagtagtttttcacttgtcttgttgaaacacaggacagaacattagtaaagagtttgcagaaagaggtataagatacggttcttgcctctagggagtgtgtgatatctctcctcttaggggcaagaaatgaagacagacttaattataattataattataagcatacagttaatgctttaaatgttcaacggaacaaatataaagacaaaatctcttatatttgggatgataaaaaaatatcttgaagactatgggatttaaactaggctttgaaaactgaagagactactgagagtcagagatgaatcaagttctggggagaagaaagacatctaaggtgagggaaggccctaggaggttaagacatggaaaaatacaataaatataattacatgagataatttctatatgagtaaaacattgacaacccaatttatccatatccaaggtggcaggcagtttgattttctctgatgctcacaaacattacataagcccctggcaaaaattttgaagaactgatatacgattttccccaccacatccagatggcttaagttctaatgaaagtctacggtcattcaaaataggtaataggcctctcatatggtatcatataatcggaaaggtattatttttctttagactccattgctcacatcagaactcccattctttggccaggcaggaaattgttcagatatataagccttacagggtagagattacatccaactgattcatgtttgtgtccctcgtggtacctgacacacagtggtgtttagtgctagttgaattggtatgatcttaagtttaaattgaagggatatttgaaatttattggtacagctacttgcatattttaggcaaccaataatttcttttcaccagcacctcaaaaaataaggcaccttacttctaattcttgtactagatcttttcaccaaagaagacttaagaacaaggcacatgtgactacccagtttccaacaatgataatgattcttataataccaccttacatttatgaatgttatatgatttacaaagtaattttgccttcttgtatcaatggtaccacaatgacttctgtgatgtagtactttatcaccattttatagatgaaaaatgaggttgaatgacattaaggaattcacctaaaatttcaaaaataataaacagttgtgtctagaactcagttcttctgtctccaaatccagaattaatttctactttattatgactaattacatgtaaattatcttgttatgtctatatgccatttactttgatagtagtgaggtactagctaaatgtactacttaggagtcataataaagcaaatgttctcataaagtaatgaaactaaagtgttctattttgataattacttgggccagtctaataggcattgattaatctacctctattgttggattatatattagatttttttctttttccagtcattcttttatcctatgaatcaatcttgtaagggacagcagagcttttcgcctggtagggttgtgtgaatgtatctgtgcagtgtacactgcagattttcagagtgtacaaaagaaaggcatgtaagcatgtacttcagtcttatctttaatcttaatttggctcataaaaatgctatttgaggactaattagttattatccttaggtggttgcaaatgcgttgatttataatggttgtaaacctacaaataagcatggtcttaaatttatgaattagagaattgacctttaatagtgcttgatgctttgttatactagtgcttcagcatagctttataacaactctaaagatttttctgtaggctgattggactctgtgtatcacaaaatagcatcaaatagtctaatcctccttctcagacacagtcagactgtaggatataattataatttcaataataaactttgaaatctatgtcaaccaaggaagaataattgtgccaactgataaatcattactttattgtcatttcaattctttcaacttagccacaaatgctaattagaaaataaacatggtagcagaaaaactatgcttatgttattttatgtgattcctgtaagtttcctacatcttgttcattatctcatttaggtcagcacttatgtttcctaagacacttttttttcccccaaattaggtgacattttaataattttagactaaagtaataaaatattcaaataattgacttgattaattcctttcaccctggctatatctaagtaatttggaaacatcataagttcagtgaaaatgttaatatgaacacatgtggtgatgccatgcagaattaacatctggctggttgaatttgagactgagttgaccagatgttttgtgttcaagttatttttcttatttgaacaatctcaacttcttctctctacttcataatttcttaatttcagctgttctccctggaggcaaccccccttctttcaaaggttaaccccttcacttgtgctcttaatcctctcctagccagcctcctctaagaccttgatccacccatgatccccctgctcttgggtcttcagtgctcctctccacagtatcctggcctcttactctacaaatatatacttaatccttccctattacagaaacattttccctgggcagtcccctttactcacagacttcttaaaggaacaatgttactgtccacttttacttcttcacacatcccttagcccattaaaatctgactaggacttcttgaacactatggaaatttctgcctcatagttgccggtgacagctgtcctaattccaatgccagcgttgacctaggtgttgcactaaacttcctttgttaacccatttctgtctctctctgtcataccatgcccaccttttctgcccattggaatcctacatatcctagaaagcttagtacacatgctacattctacactaagccctcactaatgtccttcaagtttccttctttttttggtggtccaataccactttttccataattcttacataattctgatctcattctgacttgtgtaatctaaatgttctcaggcctcgttaatatgtggatttaaatgatattatattaacatcaatgcgtaaattgatattacttctactttctacatacatcactgcttaaaacctactgttgttatttctgggagcccgaaaagtgatgcacatgtgttcatgttcaaaagcagatatgcttttcttcttgttttctaattttcttatcaatgcgtgttgctattgccattgctgggagctctctccatgcaaatgctactctgtgagacccaaccaacctctgctcatggctgctcattcttggcccacaggtgccagaattaccctgtggcttatgactgtgtgaggtgtgcatgtgtgctttggaaggtggtggcagagatctaaagaccccttctctaactgtcccctgggccctgaggcagtgtatcttgggcacagagcctcacagagtgtttaataaatatagtcctatcaactcctggctcaccatcatttgtgagtctcaaaagccagtagaggccaggcacggtggctcacaccagtaatcctagcactttgggaggccaaggcaggcagatcgcttgagcccaggagttcgagatcagcttgagtaacatagcaaaaccctgtctctacaaaatacaaaaaagttagccaggtatggtggtgtatgcctgtagtcatagctactcaggagcctcaggtgggaggattgcttgagcccagggaggttgaggctgcagtgagccctgatcatgccactacactccagcctgagtgacagagtgagaccctgtctcaaaaaattaaaaaataaaaagtatgaatacgaggcaattctctctgttatcctcaagtttgcctctctcttctgatttacccacaataagaatgtaaagtttcttttggttaagagggctatattgagaaaaaatattttatgttatattgtcattattatttctaccttcagctttgatgccagtgaaagaataaatactaacaaagtatttcattcaattcccaaatgatagtaaatattatatgctaaaccctgagaatttaagggtgaatagaaacagtcccctccattgaattatttctgtttggaaggacaggccaaaaataagctgttatggcatataatagcaatttttagatatatgtatgataaactctgagagaacagatgaagccaggaaaagcttcatagaggaagtgaaaagttgagccttgaagtgtgaatttaccaggtgagccaaggggtcaatgtatgttgtggtagttagagggagcatcatggtagttttaaaggtcaaagcaatttgaggaatagtgagaaatcccatgtggttaatgaacacaggtgagaagaatgtctggaggtagagaagacttgaaagtgtgggctgttctgaaaggtcttacttgctggcatgaggggtttgaactttattcatattttaaaaaaaagtggaggtgtagtagcaatagcactacatgctagaaaaaaacagctgagcgcatatgccattgggaaaatctcagctttcaattaggtctaggacctcccaggctgatcctaaagcaacagttgagctctcggacccaaggatacttcagaatttagaggaccttttgcgggcagggttgggtttaatccagggttaaaaaaaaaaaaaccctttcctggctgagggacaccagaaaaaactaaccttcaatgtatcctcatttctaaagagcagactgtctaatttatccttggtttttgttatctggatggcatccagtagggggacttgttttcaatgggaagtcgtttacaatgccacattgaactagtgctaatcagatcaggcgtgagattgttagagggtcatccaagctttgttttcccattaacaacctatctgcctgaatcccctcagcaaacacaaaagggctaagatttcagagtctctgtggctgtggaactccaacatcatcaaccagcctgggaggaaggcatttcagacaaaccctctaggccctgctagccaaattgcttgtaactgacaggtgatggtgggtgtcagctgggaaagaaatgacttactataaactccaagcatctctcacttcactctcaggaaatgtaacttgtatcatatttctcttcctggaagatattcagcaagtcagaggcctcactgatacttgtaaatacggaagttcttcctaaaccctgcctcacacttactcggaatggcagaattaatttggaagccagttcttgatatttaaaaatcgatttttttccatttagccatttaattttataagcaaaattaaataaataaagcttggtcttgttaaacaaataaataaagcttagtcttttaaatatgatctggaaaattcactctagctctatcaaaatagcactttgctttcaaggcttatgctttgagctggttgaagaattacctccggaaccactgtaatcagtaattaaactttttaaacactttgctatgtgaatgtatctcacactcaatttttagaacatcatttatgaaatgaaatttctctagaataacaatgtcatcttgcttttcagttcatgagcactgaaattataaaagtttcttcatcttttttttatattttagttcttgtctcacattccttattatttatttaagcaaaagatcaaacaggaaactggtaatcatgaattttcttcctaatcctttcttgttctgtagcttggtttatcctttcctttttgtatatttgaaaccgaactgttactacacagagacgtaaccatattacaaactgtggttcttttaggaacactgaacaaaaacatcaaatttggacttgctatacaatgaaattgctaattacttaatatactaataagtaaacaaatttatgagcttcattattgtctttaagtttcttgacaacaacccaccagggcctagtcatggagaacaaatgcaacctactgtctgcttctatctccccataaaacaactgtcaataaatatgagcatgtactttaaaatagtgaattaattttaaaattttctgcttttccccaactttgtcatacttacaatgctaaccattggaagggagtctgaaaagcaaagtttatcctcttaaggcagtttttattggcttctcattaattggacagccgggaatgctcattatttgttcagttgataccctctgttgctgggagaccagatacttcaccttcattaagttaactttgtagataacaatggcaggccctgatttcacaattcagggaatgaatagaatgaaagtttactgtgtgccaggaaaaccataatgtaggattggtgcaaaagtttctctttctttccatcatcatttgagatagtcacatgatcattattttcacgtttgaataaattacttatcttttagttacgttaccattctactgttgttcttcccaaagtatgaaaatcccaatgtattacttttcattaggaaaataaatacagaggtactatttatcagaacacgttttacctttcttcacattacctagttactagtatacatactgttctcatgattttcactactacttcctgaaaattacactcatctcatctttttttttttttttttttttttagacagagtcttgctgtcgcccaggctggagtgcagtggcgcgatctcagctcactgcaagctctgcctcccaggttcacgccattctcctgcctcagcctcccaagtagctgggactacaggcatctgccaccatgcctggctaattttttgtattattagtagagatggggtttcaccgtgttagccaggatggtcttgatctcctgaccttgtgatctgcccgcctcggcctcccaaagtgcagggattacaggcgggagccaccgcgcccagctttaaattacactcatctttaaggaaatgcttggtgaaccatggcacatgtttacctatgtaacaaaactgtgcatgctgcacatgtaccccaggacttaaaataaaaatgaaaattaaaaagaaaagaaatgtttggtgaaaacttctaagttttctagaaaatgatctaaggaattagagagaaaatattcctgattttttttcatcttgtttagcatggctatcttttccaaaatccaataggcagtaatttctattttgaagtcataactgtgtgttttgtgatacttcctgatctatgctcaaaatatcattagaggaaggaactataataatttacctttcagggctactagccacgtaggatgtgcaaatgtcagaataaatactttgcttggagcccaaaatatgattcattgttgttgttaatattatagtgtgattgtaaacattttatttattcatttcttgaaattaatatatttacttatatccctccttaatacttatgaaaatagagacatttttcccctcatagtgccaaaatattacttttaagtcaggttggtaatgatgaggggaattttattcttaaccaaaaaagaaagctcaaaaagatacaagcaacttgatacattggaagaaactaaccttggaattaaaagtcataagttcaagttccaacctgacctctggcagagtaaaggtgaggtagttatttaacgtctgcagctttaatttctcatttatgaagtgagatgattgatctaaattactatcaaagtccctttcagctttaggagtatagaactacaggaaactatgatgtgtggtttcttatgaccaacacatttccaaggacttgaagacttctatgaagacacttttggtgaaatattggagcagctattatattttgcttcagcctgtagagattttaaacttctttttgaaattaagaaactgatgtgtttgttaaggacttctttttctatcaaagtttttgattaacctgctttagaatcacataggatttgacttttccatctgttgttttcctgatgaatgtgatatagcacagtctcataaggcctccacgttaaggccttatgcaagataacatagattttatgctgagcaacgtaagtgttaagcacttactaggactggttataggcatcattgtggattttcatgaatggaacaaatctttatggatgcttcctatatgcaaggtactagtctagatgcttgatttacagccacaagtcttacaggaccctgtttttgtggaaatcacattccacaaaacgggcaataaatatgtaaaccaataattcttaaaaagtcaggtaggcacaaacctatgaagaaaacagaacaaggtaatgtgttagatggtgactagggtgaggacaatcttagaccgttcaagggaagtgatatttgagctgagacctgaacagtaaggaaaagccatctaaatcaagggtgtcgaatcttttggcttccctgagccactttggaagaagaagaattgtcttggaccacacatgaaatatactaacagtaatgatagctgatgagctaaaaaaaaatcacaaaaaaatctcataatgttttaagaaagtttacaactttgtgtttgggctgcttcaaagccatcctgagctgcatgtggccagtgggcggtgagttgagtaatcttgatgtaaatgaagacctctgggaaagactgtcccaggagaggaaacaggaagtacaaaggcccaaggtctcaatgagcctagtgtgttcaaggaacaaaactcaagtcattgtgcctggagcctgggtgccacacagagactggaataggagatgatgtgtcagaggaaggcaggagtcagatcacatcataccttatgagtcatggtcagagaaatgcatcttattctaggaaccatgcaacacttttagaaggttataagtaagggagggacctggtctgattttaaaagctcattctagctgctatgtgcaggccagactgtaaggaaaggcaaagaaggaggacaatcaggacactataacaggagtcctggggagagatggtggccgcttgggatagcatggtgatagtggagatggagagaagtagccagagtcaagatctgttttggtgataaaaacagtaagggcttggggtggtggctcatgcctgtaatcccagaacttggggaggccaatgcagatgtatcgcttgaggccaggagtttgagacccgcctaggaaacatggcgaaattccatctctacaaaaaaataaaaaatacaaaaaattagccaggtatggctgcacgtgcctatggtcccagctacataggaggctgaagtgggaggatcacttgagcctgggaggttgaggctgcaatgaaccatgaccacacctctgcactcctgcctgggtgacagagtgagaccctgccgcaaaaaaataaacccataaaataaaacacaaaaaccagtaagacttgctgatgggttagataggatgggggataataaaggaaaggcaggaaaaaataataacttgcagggatttgggtggggcacctgagtgaatagccatgtcttttattgagatgtggaatccttgtggagggatgttctgacgcagcaatataaaacgttcaatttcagttatttaattacaatgcctttcccctccacgtggagatgcctactaaggacttaggtatgtaagtccagagcacaggagagagaaatagacaaggtttatcttggttgcatctcacatcccctcctttttggaactttcctcccaaactcccactgccttaaggtgacacatttgctgcccaagactcagcatctcatctctgtctgtctaactcaggagagcttccttctctggatttgttctctctctgtgtcttccctcttagaactttgcttcatagcagtccccacagatctctgctctgtgctttccaaggtgagaattaattattacatagtttgttagtaatgtgtgaccgactttttgggactatcttaatattaacagagcttgtgttttataaacacgaggattttccagacaggaagaaagctctaaaagtagataattaggtgttttggcttgttaatgaaagcacttcatagttaggaagaatgttgaatgtacaatctatttaataacaattatacaaatatagagtgatcaaatgcttcctctatctcatgccaagatcttttctgtaatacagaaaacttttaggttttattctgtttgtatttcctaatggttttaagtaaattttgaccagaaaaaaaattttcattaatcagataggaaaaaatctagagaatgaagttaatatggaatttggacaaatataattcattcttaaagtcctatacagtggaattgcttcagagttaataaaatgttattttttatccaactccatgtatattactactagtaactttgtaattagatattccattttaagtaaatgggtgaaatattgtcataggtatgtttttatttgaaagttttttgttttgctttttctcctaatgcttcagtgatttacttattataaaggctataggttgggagttctagacttttgcaacttaatttttacctaccaaaatagaaaaaataatatttgttagtgcccttttaggtgtgtgagggggtgcagtatgtgccaattctccctcatctctgtccttgaagaatatagggataatttataggtcacatcagaggttagggttatttttcccaagatgggaatagttgtaatttttaaaaacctgatcatcagcacaattcatgccccttgcaaaaactgagaaagtagagaaaatataaagaaaaaaataaaaatctttcttaatcttaacaccaagaaagaaacattttaatgttaagatttttatgaaataaatgttttattagggtcaaagcctcactggcagtggttctgacacctggacactgcttgtactatagttagtcatttttaaggagcgctatttctgatcccctggtcacttccccgaagtttcatatggttttcttccattttatgattaaacagggggctgctgtacatagagaatgtcagagagcagatgcaagctacattttatatttctgcaacattgaagtgaattacaagtttaaaggaatccaagatatatgaattacaaggcttcagagatactccagattacatctagagctggctccctccctcagaggccagtgtgaagtggactcccaggcagcaattttcccttgacatgcctggagcacttcgaccaactttagtttgactgtatgatgtttagttagccatattttgaaaatattgattttatattgaacattttgttaatctgatatacttgtgccctcataggcccatgaatatctagatgaccttaattaatgtgtagaaaagtagacaatttaaaaaaaggataaattacacttaaatttcactgagtctaggctcttcaaatgtaggttagtattaatttatgtggataaaatttttatttatgacattgaactacatacaacatgtataaaatggagggaaggcaggaaacatcccattgagaatttctagtcatatatatatattcatctatatattcatatgtatattcatatgtatattcatatatatattcatatgtatattcatatgtatattcatatatatattcatatatatatcatatatattcatatatatattcatatatatcatatatattcatagacatatcatatatattcatagacatatcatatatattcatagacatatcatatattcatatacatatatatcacatatgtatcacatatatatcacatatgtatcacgtatatattcatatacgtatcacatatattcatatatatatcacatatattcatatataatatatccatatgtattatatatccatatatgtcatatatcatatcatatatcatatatatcatatatcatatatcatatatatcatatatcatatatcatataatcatatatcatatatctatatatatcatatatcataatcatatatatcatatatatcatatatatcatatatatcatatatcatatatatcatatatcatatatatcatatatatcatatatatcatatatcatatatatcatatatattcatatattcatatatattcatatatattcatatattcatatatattcatatatattcatatgtatattcatatatattcatgtatattcatatatattcatatatatattcgtatatattcatatatattcgcacatagattcgtatatgtatatagattcgtatacgtatatagattcgtatatattcgtatatagattcgtatatattcgtatgtagattcgtatatattcgtatgtagattcgtatatattcgtatgtagattcgtatatattcgtatgtagattcgtatatgtatattcgtatgtagattcgtatatgtatattcgtatgtagattcgtatatgtatattcgtatgtagattcgtatatatattcgtatgtagattcgtatatatatttatatgaatgaacttagcaagtaaggatcagcgatatttttcttactgggagtatcactgaataagcaatggataggatttcttataggaaattacactccattcaaaatattcaagcatggatatcttagacatagcaagctgtcattatatctctctggtaacccaatatggcctcttttataacagaaattttggcaagacccagagaaactattctgtgtcacgttaagtgtttgtgcttgtgtggtataaacaacaagcatagtttgtaagagtagatttttttttaatattttatttttaaaatgcagaagtttttcttcaaatagcataatcttggcaagcaaaatcatatttggtcttgaaagcacaatataaatttctgaaagggaaatatagtaattataaagattttcattcattataaacttagattaaaatcaattattccttaaatatagctaaatttatttcaatgtatattttaaaatataattgttatatataaatattgataatactcttatttttttgtcacagcagaaactactcatgagatgcaaaaatattttcagcttttgaactagattataaattatcgaaaaataattctatttaggttttttttttttttttttttgatatggagtcttactctgtcacccaggctggaatgcagtggtgcaatctcggctcactgcaaccttcacctcctgggttcaaacaattctcctgcctcagccaactgagtagctgggattacaggcgcgtgccaccatgcctgactaatttttgtatttttagtagaaatggggtttcactatgttggccaggcaggtctcaaactcctgacctcaagtgatctgcccgcctcggcctcccaaagtgctggaattactggtgtgagccaccacacccgacctctatttagtttttgtttattaaacatcaaagtatcatatcaaaattcagtacatctctgtctttcatttgctggatcactcactcattcaacagataaagtgccctgttgggactgcacttaggctttgtgagtgatacaaagtatgttaaatgctgtgcttgctttcaaagagctttcagtcttaacaacagatggactggtgactgcatgactatcatcctaagtagaaaatgaagagaaaaaatgtttttattatcttttgctttgtaagaaaccactacaaaacttagtggctaaaaataacaatttgttatttctgaaggatttcagaaaacctactcctcaaaaaaagcaataagaacacaggcaaaatttgtcaaaatcaatatattcagaactttttaaggggctttcacaatctaatgagtgattattcaagaaaaactttgaatctcagtaagactagcaggctttatggcattttaacttgtcctattcatatccctctctctccaacacatggtaggcttgaaaaccagtagcttcagaatcacagtgaaaactagctgcctagcagctgctggaaagggaagaaagagtgtgaagttcattaaaagctccattttcagggaattgccattatttttcctgcctggtagttccctaaaaaccccaattcttagttggtctttatttgacctgatcagagcttgtaagaatagccctttcctgtggacattaattgaaaataatcagtggcaattgtttaatattgcagctgcctgaggcaggagttataactggaataaacaagaagctgatcaaaaaaatttttaaagaaaaaactggggaagaagacatccatagagggcactagaaagctccaacatatttgtaggactccagacacatatttctatgttacagggctgtgtgaaaactccggaaaggcctgaaaaggccttaaaatctttggcaaaactccaagctctgaacaagcagaacatgaaggctaaggtgatttataaactaccagcctgaacatttaaggtattttctgtcacacacataggccttcagcaaaggctgggatgcttttgggtaagggtgtttaactattcaatcattagttgactactaagctaaatgagcagaaacttcaggagtcaaacactttacagaatttgtccagaaaagtgactaagcaaataaaaagcagcaacaataaagacaacagacagcaccaacggcaaaccattgacaggtagagtctaatttccaatgttaccatattatattattttaaatgtcttcttttctttcttcttttaaattatactttaagttctagggtacatgtgcacaatgtgcaggtttgttacatatgtatacatgtgccatgttggtgagctgcacccattaactcgtcatttacattaggtacatctcctaatgctatccctcccccttccccccaccccatgacaggccccggtgtgtgatgttctccttcctgtgtccaagtgttctcattgttcaattcccgcctatgagtgagaatatgcagtgtttggttttttgttcttgtgatagtttgctgaaaatggtggtttccagcttcatccatgtccctacaaaggacatgaactcgtcattttttatggctgcatagtattccatggtgtatatgtgccacattttcttaatccagtctatcattgatggacacgtgggttggttccaagtctttgctattgtgaatagtgccgcaataaacatatgtgtgcatgtgactttatagcagaatgatttataatcctttgggtatatctgggtcaaatggtatttctagttctagatccctgaggaatcgccacactctcttccacaatggttgaactagttcacagtcccaccaacagtgtaaaagtgttcctatttctccacatcctctccagcacctgttgtttcctgactttttaatgattgccattctaactggtgtgagatggtatctcattgtggttttgatttgcatttctctgatggccagtgatgatgagcattttttcatgtgtctgttggccgcataaatgtcttcttttgagaagtgtctgttcacatcctttgcccactttttgatggggttgtttgctttttcttgtaaatttgtttgagttctttgtagattctggatattagccctttgttagatgagtagattgcaaaaattttctctgattctgtaggttgcctgttcactctgatggtagtttcttttgctgtgcagaagttctttagtttaattagatcccatttgtcaattttggcttttgttgccattgcttttggtgttttagacatgaagtctttgcccaagcctatgtcctgaatggtattgcctaggtttttttctagggtttttatggtttgaggtctaacatttaagtctttaatccatcttgaattaatttttgtataaggtgtaaggaagggatccagtttcagctttctacatatggcaagccagtattcccagcaccatttgttaaatagggtatcctttccccattgcttgtttttgtcaggtttctcaaagatcagatgtttgtagatgtgtggtattatttctgagggctctgttctgttccattggtctatatctctgttttgataccagtaccatgctgttttggttactgtagccttgtagtatagtttgaagtcaggtagtgtgatgcctccagcttttttcttttggcttaggattgacttggcaatgcgggctcttttttggttccatatgaactttaaagtagttttttccaattctgtgaagaaagtcattggtagcttgataaggatggcattgaatctataaattatcttgggcagtatggccattttcatgatattggttcttcctatccatgggcatggaatgttcttccatttgtttgtatcctcttttatttcattgagcagtggtttgtagttctccttgaagaggtccttcacatcccttgtaagttggatttctaggtattttattctctttgaagtaattgcaaatgggagttcactcatgatttggctctctgtttgtttgttattggtgtataagaatgcttgtgatttttgcacattgattttgtatcctgagactttgctgaagttgcttatcagctgaaggagattttgggctgagacgatggggttttctaaatatacaatcatgtcatctgcaaacagggacaatttgacttcctcttttcctaattgaataccctttatttctttctcctgcatgattgccctggccagaacttccaacactatgttgaataggagtggtgagagagggcatccctgtcttgtgccagttttcaaagggaatgcctccagtttttgccccttcagtattttattggctgtggtcttttcaattaacaattagaagatatgcaaaaagaaggtatgcaaaactatgtacagataaaagagtggccaatagaaactgtttctgaggaaacctagacattaaacttacttaacaataactttgtctgctattttaaatatacttaagtaactaaaggaaactgtaatgaactaaagaaaagtatgagaatgatgtcttaccaaatagagaatatcaataagtagaaattattaagaagcagcaaatcaaatttttgaatagaaaagtataaaacagaaatgaaaaatttacaggaggggttcaagaactgatctgaggtaggagaagaaagaatccaggaacttgaagatagttcaattagtctgcagatcgggggaaaaagaatgaagaaaaatgaacagttccaagactgtgtgataccagcaagcatgcataataggaattctaggagtggagagagagtaaagaaagactatttgaagaaataagcaatgcaaattcctcaaatttggtaaaaggtattaacttatacattcaggaagctcaacagactctaagaaggacaaactgaaagagatccacacttagtcacatgataaccaaactgccaaaagtcaaagagagaatttttacagcagcaagagagaagtagttaaccaaaacagaaaacaagaagttctcaatatgagtaagctgacttctcatcagaaaccatggagaccagaaggcagtgggatgacatagtcaacgttttgaaggaaaaagactgtaaatcaagaattctatatccagcaaaactatccttcaaaactgaaggtgaaattaaggattaaaaaaacccagaatttgagactagcacatctgccctataagaaataggaaggaaattcctttaggctgaatgaaaggaaactagacagtaactcaaatccaaacaatgacataaaaagcactggaatagttaattacatagataaatataaaagccagaataaatgtacttagtttgtgtttcttttattttcttatcagatttaaaatacagttgtataaatacatacatacataaagcaatattagaaatcttcattgatgggaatataaaatataaagatgtgatttatttgtatgacaatagcacaaagcaagaaaaagctaacaggtatatagaagcaaagtgaaaaataaagctaaaatatccatgttatatttagcatggtcttcagttgggactaagaaatcagtattaggaactcatttgcaagaatttaatatgaaaaagtttctttggaaaatatttgtttacttattactggtgttctttaaaattctctgtacctctctctactaacaaaatcaagtcataccattttatttccttgataaatctctactgtttgtcagactgcagtgaattctgagattttcttctgttcaatatcttgttgaataaggaaatgtcacaatttaatactgtaatctcttcactcatttttatacactccaaactttaacaacactgtaccagaagattttttaaaaggaaagagaaaagtgcataagttacacatttactgagaaaaatatgactgagatattgtgttacacagaactttatacctagattttattttcttgcaatctccagtttccccacaaaagttctttgttttcctcccacagtaagatatttcccaaaggccttcctgaggagtactcagtagctgccatgtttcgagtacgaagaaacgccaaaaaggaacggtggtttctgtggcaggttttaaaccagcagaatattccacaggtaaagtaccattagagttgtgctcattagttttccttgtgtaattaagccaggtgaattatttgaactggtgcacaaatttgcgagtagatctagtatccaaatgttctatcctttagagggatcatcaacaagaaaatgcaagtattctcgtagttaggatggccttgctgagatccataatatgagagtatagtggtaaacatagtgttagtttttgtttttattttacttctaggtccatattttgtttaaagatgtaaaactgccttctctttacaactgcttcattaactaattctttctaagtaacacattcttcatcttccttctgtcgtctctaatgttatatattatttttaaagcagtttatcatttcattggacaactcttggtgaataaagagttgagacttaaatatttatcccatcaataaaaatttatggaacacatactatatactaggtagtgacaagaaaagagatctgaaaaacagaatttgtattatcagggagcataaggcgtaaggagatgacatctaggagaacaacataatatagcataattatgttgaacaagtgcagtggtagagttaagcttagtgttgggtgtggacaatgggagcaccgaaagggcagctcatcggaattgggggatggagagagcaggaatctaggagagcatatagaagagatggcgtttgggctgcaaagaaggaatgctggcactccagcgaggggagaggaacctcaaaattacttgttggcaccatacattagtttttacttgtgtacatatccgttgaaatgttttaaatcatcactgatcttttaatctgttaatacagctacaattttatgatgagtagatcaaccaagagtatgtcctctataaaatgtgttttctctgtaccttgcaaagtatcaatggtgaaagaattgatcttagcttccctacttagggaaatgatcacattcttagtcttcttaaattggtaaccttaaattcctgtgttactaatacagagcaataatttatatatcttataaaattttatctatagtgtatataaattatgtatatataaacttataaatggtttatataaacatttaaaataactacacacacacacacacacacacacactcttagatgttctcttaggaaggagcatattacattcaccagaatgccccatttctaaaccatttttgtagtggtgtttgctgttcttttattttaacaaacctggtggacacaagtgtcatctaaaatattttactaagtgcctcagttatactaatatgcatcttgagcttttctttgtgtgctttaataattttgaacattgatttttaaaacatttaaagatactttacatttttgcagatttctatagtagttgatggtggaaagaaggtggtggaatttatgtttcaagccacagagggagatgtgttgaactacatttttagaaatcgagaactccgtcctttgtttgatcgtcagtggcacaaacttggcattagtatacaatcccaggtcatttcactttatatggattgtaatttaattgcgaggaggcagactgatgaaaaggacactgtggatttccatggacggacagttattgctacgcgagcttcagatggcaagcctgtggatgtaagttgtgatgttagttgtgaaagagaactaaaatttctaagtaaaaaaaaaatcttattaaaaacattcttcttttattactgtgtaatagattcccttctcatcaattttattaatttaattaatttgccgtcagatgtgtgaagaacagctatgttatttccaattgtattttcacatgtattattttcactccattttatacccattttctccagcctgggaatttaaaataattaggtcatgccttaaaaaattagattattaaaagtaaaaattgaaaatatgatacaaaatataaacttggtctaagttcatatgttttaaatagaaagggctggaaaaagctgaagttcaaattaaatggttccaggttatctgctattttcattcaagaacaatagactattcatccttacaatagcaattactttgtattgcagactattttttataagcgtataatggtttttcagggttctattgtacagaaaaattcactaaatgtattagtaggtcatttgaaagagaaaaattgcctagtaaaacccttttggataaaaagttactttaaatattacatttgaagctaacatgatatagatttattattgatttccctagagaacaaggtctgtaatcttaaaaaagttagatatatctaaatttgatggctgcacgttttcttagtttattatgtataaacagtttatagtttatttcttagagtttttgcaagaatgagatccagtcttggacctcaatctaagaagattgagtgttctatgtcctgtgtctcattaacttctcacccaaggatagaattgatcccgggctaggcgcagtggctcatgcctgtaatcccagcactttgggaggccgaggtgggcagatgacgaggtcaggagatcgagaccatcctggctaacatggtgaaaccctgtctctactaaaaatacaaaaaattagccagatgtggtggcacacgcctgtaatcccagctactcgggaggctgaggcaggagggggaggttacaatgagccaagatcatgccactgcactccagcttgagcgacagagcaagactttgtctcaaaaaacaaaaaacaaacaaacaaacaaaagaattgatcccacaatttgaggctaaagaatatcacgtgaatccttataaaaaggatataggtaaaaaccgtggtattacagtggtttcataatttcatgtggattcttggttcatttgaggataaacttgaaggcatgtcacaatgatgcaatatttttggagatagtcactgtttgagttaaacaaacaaaatacatatttttataaaagattcttggttctactgaaactttgaatggattaatttttcatcatctctgtacaagctctgtgattcataagatctgttatggtgtgaaaatgtgtttatttgggctgtgtgttattgaaaaaaattatcatgatttagttttatttcacctatcccacctgtgtatttttgtgagaaagtgacaaaactgatatgaagatttttttttaaatcaactcagcattttgacaagcatcagtacagatttagccttaagcattctccttctaaagcactatatcagtgaagcattctaaagtaatgaatgaataaacaaagcataaactattctgactgtcatttcaatgtcatggaactcaatcaggttgtaatcctttgaaaattgatcatctatctttagttaagtaaaacaattcataagcaggacctggtacaatggatggtacataataggatttcaatatttattgactattttgataacagtgataataaaaaagtttagttaagaacaatattaattaactagagttctcattcttcattctaaataattcatatgttactgctggtatttcattatactatgtaagacggtgtatttaaattttataaataaaaattaaccttaataaccttgcaaaaagttacagaacataaatcattacatttcatttagtctcatgattttgcattttctgcaaatcttaggctgctcatgaatctgtaagatgtctggagttgttaacgcattctatgaactgcattgattttgttcatctgaggcgaaaagtaaaagttatagatttttcccccctttttgcttttaaagttggagtagagattcacctctaatcacaaatgcctgctttctattattataagattaattattataagattagagttgggtctttctgtataaagtacttattgacctcaaaataatgcattatttaatacatttcagtgcttaaagaattcaaacagcctatttaagaatttattatattgctattttatcaataatcagtactatttactttttcttaggtgttgatttcatcttgcatttaaaggcatgattttactttccttgaactacagttaatttcatgtccaaatgccaaaaaaagagaaatctgctaagcaaatagaaggaatcaattatttttgtaaaaaggttgttagccctgcttagattataccaatataatataaaatcaataggttttaggcagaattcgtgaaatatagataaaaaattttttttccttgttggtaagtgaacacctatttcagtgcctcaaataggagtctggaagtacaaataaagcctttctcatcatgtgctcatatctttgattttaccttttctccaattttttttttattttgaaatggcctcattttgtgggcattctttactgtagtgtaaaacaatagcttttttaaaattaagtacttctattttattgtttgaaacagctagccaaggtttgcaattgctttcattacctgatttcctttatctatagatccatctctatatccaactctatgtctctcaagtagtccacaaaacaatgaatcctacatttaataaaaacattaaaatatccaccagtaatttatttatattagcttcctttttctttctgattaaattactgtagttcttaactgcctgaatgtgattccaaaaaactaaagatgtttcttattactaattttttcatagattgaacttcaccaacttaaaatctactgcagtgcaaacctcatagctcaagaaacatgttgtgaaatatcagatactaaggtaagttaattttctttgcatatgaagaatgaagaacgccaattatcttttagtggcatagtttgtagagtccaaatgtagggtagcactgagtgtgttctgttgaagccaggtgggtaatttattcctagtaaggaagcattcatagtgctttctcatggttactttcaacagttttaatcccagcatttcacccttaattttgagggtaatatatactcactttgaactcagtataacttaaagttatgcctttcttcctaaactatgttctgacagcagcatcatttccagttacagaagttttaaatctgtgatcatactttattctcactcattttccttttctaccctgtcacccatcctggctagctttcctttgacatagacttttcatccttatcttccattttcctgttactgccaaagtgtacatttacctcgtgtctgggatatcaatcattattggatcaactgccttccctatgtcctgcccctttgctttgcagcataaccagaataagtctgagtcactgctttgtatattcattcactctcttccagcaaacactttattcagaaacactgaccttctaaacactgtgctaaggaacagggctaacaaacatgattaaggcacattccctgccctctcttcatgtctttctcttaagtgactcctgttggaagtgaaatataaatgcagtttctcagcctctcattctaaatattcccaacctaaccatacaactgttacttacttataccaatctttcattacaagaaaaatactaaattcaatactttctgtatctctcagtgtaatggccgtgtgtgctatcttatattactaggtgtaactatatttgtttttaaattgatttaagtacaattcagactcagtaagggaagttttaccttgataaacttttttattcctaatgcttcatttggaaaaagtagacaatcattgtttgatttattgacttaccaattactaaaaaagataaatgggacagaaagatattcaaaggggactggttctaaaaaaaagtacagaaagagcatatgaaaagtgcaagtaaaaggtgaaaatgtcttttctttggatcttagatttcataaatgttctatacttgccatagaaaattatatgaaaattttatcaacaatttatgattcaaaaatatttttgacttttgtagctcactttgggtagtgaaataagaatgtgaccaaagcatagcttaaagcatagctttagtgacttaaagcatagctaagtctttcaagtattatatgttttgcttttgtaacttggctttataaagcatatctccaatccacttcatgtatctcattccaagtaaaatgccagccagccaaatatctttctataaatatctgaaaagataatttagaatgccaatctacagacttgaaatacctagacttcctggagctacacatttaaatcttaaagatgttaattcccccaaaattttgtttttaattatgcttttttgatgtcagagtttttaaagtaataactttctctggttgtaaagtaatataatgatattttgatatatctgaatattatataattagccagtaatcactgccctttatcattatattaatgtaatagaaactttccacctgatttatgaggaaattgtttaagaagtataggtgatgaattgggtggaatggttggtaattcaaagcagtgacatgatctcacacattatgaacaaaagatttttaaatcatattttgaaaagattatttgggagttagttttaaagaatagaacacaaggtaggaatttatctctgactatggaaaaaataaggaaagactgtatttttgctgacaattatttggaggggatatcaccattcatttaatgactaacaaaaaatagaaacatactacattttatgaataggaatgtacagttggaaggataaataattatataaaagccatttaaatgcatctgctctacttccaatacgaattgtatttattttcttttttgttgcaaaatgttttgaactcagaaatttttaatgtagttgcttaaatatctaattttgtcctggaatttcaaatcacacatgttttctggttgtcaatattttataaagcatttcaaaggcaacattttttaaagatcacctataaagatgcttctttgtttctattggattttcagtttctaaagtagttaagtttcatgactctagatataaaaagaatgaagaacaaatattaagagaaggatgaaatcagtaacatttgttgaaaataaatgagaaatgtggttaaatttttaagggctaatactgaatatgtgtcaaatcaaaaccagaggttttacgaggagaagagtccttacttgtatgtttggtgttgcctctaggcactttttgtggagtgtggacaggtttatggtgaagcctgagacatacttttaaagttatttaaatcctcaatttaatatagtgactcagttatccagagcagaattgtgaattctaagtgggtcttggttatctgactggaaagccatgaggtaagaactggctgaaacatcatatcaaatcaaatgagatgaatgaactgttttggtaataaccttgttccattcaaatatacaatagtttttagactttcaaatttgggaacttgttaggataaataatcctgaaatctggagagagtagatttgaaagaactagtggtggatacagtaaactagttgctgtatttctgggtgttggttttgttacagtttttattgtaattatcaaagaattcaactactaccaagtttttttttttatttcttatttccaacttttattttaagttcaggggtacatttgcaggatgtgcaggtttgttacataggtaaacgtgtgccatgatggtttcctgcacagatcatcaaaatgaatttttgttacaaaacttatctatgtttactggaaaatatagccaaatccataaaagaaaataaatatcaatcatgatttcaaccacagtagaaaaccacagataatattttagttttgtatcctgaaaatactttaccatgcatttataatttgtggtatacaaagtaatgtattaactctctcctagtgctttctcttcgtgaaattgcaaattcagagtggaaaactatggtgagaagtctggtacatgatgttgagaaaaaacaatgtgtttatcctcctcagattctccatttgggttaattttttaaaaaatgttcgttgctttgtaaccaaattgcacttcactttgtccagcatgctctgaacccactggataagtataaaatgcactacttgtctgttgtagtggagacctttttaatatctttaaggaacagtagactagaacaaagtatactttgatttaataaatgttgtctaagagtgtaaaaagaatttattttctactttatatgctttaataatcatcttgttgaaggaaaccatattttataggttcaaattacatgtttcaactttaatttttgttcccaaaagatgtattcacatgttgtttgtacaaattattttattgcaacaatacaattattataaatgtatgaaatttctgtacttatcaaaaagttacctaatgtaactttgtaattccttaccaagaccattattttaaatatttttcttgcatgttgtcagtataagaaaacccatgggctcaggcggaaagtgcaaaagtgtgataaacattctcacactggtgttaacttttggttagtaagaagcagttcttgcaggcaacctcagcaatccctagtttagtgggagccagtgtttggaacatgagaatgtttggaattgaccccatttcctaaagcctctttttggattttagtgcccagagcaggatggctttggaaatattgcatcatcatgggtaactgctcatgccagtaaaatgtcttcatatctgccagcaaagcaggaacttaaagaccagtgccagtgcattccaaacaaggtatgctagttttaattggtgcacactgaaagccactccagactatgagcccagctccttgaatgtggcctctgttcacagaatgtgtcttgccattcagtgtttgttgaagtaaatacctcagttactggggtgggttaagaaaaaggcattgaagataggacttcctggattcttacctggatagtttcaagcccatctgaacttccttccagggtgtgaactagaatgaatagaaaagtgaagggaggaactacctgtacaacaggcaagtactgagtacttagcatgtgccaggaataggctgaagttctgggaattcacagttgaagaaaacacagtgcctgctcttcaaaaacatacacaaaaatactctacattgtatttctttttctgtatagactgtgtttttccagcatccctaaattttcaactggctgtctccatccaccataagttattaggggaatatacagaggggctctgttgttactcaaataatttgtttcatctgcaccaatatgatcccctggtcaagaaggctgtgccatggacctttatgaacttcctttatggatgttaatggcagtaataaagcctgtgctaaaaggctgagtggtgtcttggtggctttttccagtgcccatacctgaggaaaggagaacttgccccagtttctagagcagagtgtgccctagcactgtgacttaaaacatgtcatcgacttactcatccaccaccacttcaactcctggctgagccagatggggatggggtgaaagtttaagggaaactttcattttttctagtggccaatattgcatagtaagctctacgagaaaggcaaggttcgggggtccatagagaaacagcttgtgttccagctcatggaaggtctggaggagatgatgctaaatggtgtttggaagagtgaggaacagtgaatggaattccattggcatgccctttttcccttgttcacgtggctcactattcctcactctaagcatcagctcagaggagaacaaagcgttatcttgctagtgccagcttcacatttataaaccatttggctttagatcaatgtgacagaatgtttgctaacacagatatgcatttttgctcagggagaagcaggattaccaggagctccgggttcacctgggcagaaagggcataaaggagagccggtaagaaaaaaacaaatactgatggagaaaacagggttttgttaaaaaatgacttaaaaatgtgttcatctcatttttctttattctgtacaaatatatgtttctataaaaggctatcaaagactatattaaaatgctgattactgaaatagagactatcagcattctagtcagcttttgaattcatattggtaggctggtgtgaactttggaaagatctggaactgcaagtctttgtacctataagctctagcaaaactgtgaagcagaaaagtctattttctagctgtgccctagccttctttagcattcccttccccaaatccctgttgaattcttgcttctcttgtcttttgatacatccccaccagagatttttctgtagctctctaccttttttttttaaacggccaactttttttgaatactttctgtgtatgaggtatgttgcttggtgttgtagagcacataaagacaaataggatatattccctgttctcaatgattttacatctagaaagagatcgtggaaaattacaaggccatatgtgttaggtgctgtaggagagttgcaagtgtcctggagaaatgatctggggagctagggaggatttaatggaggaatggccagtggactggacctctaagtgtgtaattctaggctatatcccatgcttagagatttgtctttcccttctcccatgactcaaaacttaactgtaatgtttctgactcttttgagtatatcttttgtcagctaatcaggtaaatgaatgagcactgttagaagttgattctgtttttattatctctccaaggtaaaatagattttaattcctttcctgccttaacttgggaagtccatgattctaaattatttgtataatctattgctccccccgctttaaaaagacaggagacggaagtctgagaaatgactgatccctcaaagcttcaacaaagctaaagtcatttgattcctgaaggaatgtattcccatgtaccttgcatgggaacttctgacaactcagcaggtgtttgaaaaagatttttgaggagggacaggccatttattattgctctttaaaatgcattgcttggggtacctttactttcaatatcattttatgaaaattcaaaataattgaacaatatctgattctaaagaccacttcaatcaaactaaacatacaaatcattataccaatagcaagtatttgtttcatggttacatgtaccagacactgagaagaatgttttagatatgttatcatacttgatccttacactcactcttcatgttagggattagtattagcattttacagatggaaaaactgaagcttaggggggttaaattattgcccagtgccacatagcttgtggccaaactgggatctgaaaccagtaggtctgttgactactcatgaccagtatccatttttaaggctgccactatgttctaaaagcaattcagtattatgtatctgtgttctttgatcaggtacttccacttgcgatattttactcttaaaacatcatttaaagatgccagcctagtgtctctatcctcattttacagctgagagccacacataggtaaattgatgtgcccaaggtaacacaattaagaggactcagaaagtggaaagatctctgagttaatcccaactcttctctggttagagggtgaatttggccaagccactcagactctccatacataagttttcttatctgcaacggaaggtgttctcacttatctgttatacctatactataaagtgacaccaaaatgccttgaaaaaaatgcatgtggcttaatttttggtgactgtgatttatacacgttcacatacacatttcttaacttgtcttttcacttctttgatttatcagttccttcatatttaagattgctggcacaggaagaaatttcatgtgttgcttttaggaaaaataccctgcccactgaaaaaaaaaaatctatgtcataagtacagtcctatttgaataattattttaaaaatcgttaaatctactttaaattcttttttaaagattaagtgcttagtcactgttgttagagcctataccttttaaggatgcattttccccctcgattccctttaatcataaatagacatctctcactttaacatttaaatatttatttttctttattcattcatccatcaacacctatttattgagctcctgctattataataaaaaatgtgccagactttggagccttagcagtaataataaaatacagggcctgctctcaccgagtttacaatcttgtgacagtttgttcacagaacattctctccttctatagaaactaaaaccagtagaaaagaactaggaaaaattaataaaaatggataaatattagccaatttattgtatgtcaaatctataaaatatacaaaaatgtatcttagagtaacaatgcattatatgacttctcatctgcagtatgttttaagaatattaacatttgttttaaattccatgataattcataatggcaagagattttagtggcaacgtaaaaacagctgcaataaaggaaatttataatctacacaacgaataactaatctgtgtatttcccttatcttttcaatacatgcacccacatttgcttaaaccaacatatgctctgccttgtaaaaatgacattagatgaccatgaccatgaatgcattcaaccttcctggcacttgaaataaacatggatgtattgtttcattttaaggaatggagggtgggtttatttctgctcctattgcactatgtgatcttgcaactttaatgtgcaataaataaagaaggctttccttcatttttgattctggcatgtaattgtcattattagagcaggtgcacaaaataatgcctacataacttgaagatcgaaagtcatttttgctctaaggcatattcagtagtaaattttgtgaaatgatcagaagtgcaatgttactaagggaatcagatgttgttctaaaggttttctttttgatctgtaagcccaagaaggaatatttagaggaggtagaacagtatgttggaaagagtaccactttggagcctgaaccacttaggattgaatcctctccacctcttacttgctttgaaaattatccttaataatacctagccagtggttgattgtgaagaaggaatacaatacaatatatacacagcacttagaaactggcatattatagatattcaacaaatatatgtttcccctgctttcttatccaccatataattgtccatatattgaaggagaggtggagataactattttaggttgagtttaatttcatttgtggcttgatgaagaacaaaggaatcttcatttgtgagatactgccttagaattttcaatttattagatgtaaaaatgttgagttatcatcacatgctacttgtggtaaatagtaataattgatcaatagttgatttcttcaaaagattactcaataagttgactatttcattcaactctgtatcttttatttccaatattatctgtatctgaccttctctggatacaatgtgctagttgctttttttttttttttttagacagagacttgctctgtcacccaggctggagtgcaatggtgcaatccctgttccctgcaacatccgcctcccgggttcaagcgattctcctgcctcagcctcctgagtagttgagattacaggcacccgccatcatgcctggctaatttttgtattttttggtagagatggggtttcaccatgttgaccaggctggtctcgaactcctgacctcaggtcatccacccacctcagcctcccaaagggctaggattacaggtgtgagccactgctctcagcacaatgtgctagtttttcaaatatgttccttgcattgttttacttagataatgtcgattagaagccatccagacacaattataacttactttttctcattaactgtataatattagtcttttggtgcattttacttttggcccaatgtaataaagtgagaaaagatttgagaatacaacttccacatctctttcaaattatatgtcactacattacagtatttctaaaggtgttaagatttttattaatatgttaattgacataacaattatacgtatttatggagtaaagtgtgatattttcattcatttatacaatctgtactaatcaaattgggataattaacatgtccatcacctcaaatattcattatttctttgtattgggaacattcaagattttctcttttagctatttgaaaatattcaataaattattgttaaccatagtcaccctacagtgctattgaacagaagagcttatttattctttatagctgtaattttgtatctgttaaccaacttctccctatccccactcccacccttcccagccccagtaaccattattctactctctacttctatgagattaactttttaaacttctacatataaaggagaacatgcagtatttatccttctgtgcctggcttatttcacttacaacaatgtcattctgactcatccatgttgctgcaaatgatgggattttactcttttttatggcttaatgtcattccattgtgtgtatgtgtgtgtgtgtgtgtgtgtgtgtgtgtgtgtataaaacattttctttatccatttattaattgatagacacccattttgattccatgtattagcgattgtgagtagtgctgtaataaacacaggctttcagttatcttttcaccatacttatttcctttcctttggatacatatccccagtgggatttctggatcacatggtagttccatttttagttttttgaggcatttccatactgttctccataatagctatactaatttacattcccactaaaagggtgcaaaagttcccctttctccacaactttggtagcattttttttggtcatttagataatagccattctaaactagggtaagatgatatctcattttgattccaatttgctcctccctcatgattaatgttgagcattttttgatgtatttcttggccatttgtatgtcttcttttgagaagtgtctattcagatcattcacccattttaaaatcagattattggggtttttgtttgtttgttgctgttgagttgcttgagctccttgtatattgtggatattaatcccttgtcagatgaataccttgcaaacgtttactcccattctgcaggttgtctcttcattctcttgatggtttcctttgctgtacaaaagctttttattgcaatatggtcccatttgtctatttttgctttggttgcctgtgctcttgaggttgtagccacaaaatctttgcctagactaatgtaccaaagcattttccatacattttcccccagaagattcatagttttgggctctacatttaagttttcaatccattttgggttgatttttgcatatggtgagagataaggatctagtttattcttttgaatatagtttttccaacactgtttaacaaaaagactgtcctttcctcaatgcacgttcctggcacctctgtcaaaaatcagttggttgtaaatacatggatttatttatgggttctctagtgtgttccattggtctgtgtgactgttgatgacaatctaaggtgttatgctttgagcatccttactttaatgcagcaaattcatagagaaaaatgttactcttatttatacacatacattatgagttagacaattattccgaatagtcatgtaagcaaatcctgtcccacctgagccaaaacccactaatgacttcttgtctctcttaaggtaaaccccaaagctctaaccatgggctatgaggcttcacataatgtgtagagctctcccctacctgactcctcaatcccagattgtctcgtaccctcttcccttgttcacttttgctccaagtcctttgtaccagttatgtatgcctgaagtgtccttgtccacatccacttggctcgctctcttcttcacatcatttaggcccttgctcaaaaataactttaaaataaaaaggccttctggcatctctatataaaaagcatccttactcccacctctatcctcttactttgcttagcacttttactgccacctgacacattgtcatcacgcatctatttctttccctgttggaaaatgagttctgtgagcctatacatagaacaacacataaataataggagctaaaaatatgctgaatgcatgaatgaacactatacctcaaggaaagtttaaataatcaactcagctatttctagaaactgtaagttctccttcctaattgcccaggagactctgctgagcaaggcaaagattcaatttgcaaggaaagaattaaataatattatattgttaactattgttctactacagttttttcttttaaaaaacaaaaattcttttcacattgatttaatcaggtttagcttagtattgtctaggtaatgaagcatcaaaaatattttgcaaaaagccagaagttttggcaaaacttaatatgtatttttatttgcctattttcttatctactatgatggtttattaatatgatttactactttttctttttttataaaggtgatggtcacctctcatggaataatgcagttttaagtactactgcttgtatttaattatctagttgtgatcagcattctatatcagaacacctaatcaagcgattttaaccatgctctttaacactaaactctgtataacattatttgaagtaataattaatacttttctttcatttagactcaattgtaataattttctgaattttttaattcccttttgttagcaaatgtagttagcaacctaattccttagcaactgcattactttctcagttctttaagacccttgttaataccctcacccatttcagagctgaaattctctcagagttttataaaatattagctcaattttaatgttcttgaacctgaggggaagtgttatctgagctccattttgggaataattttccagtttatttttctattattatcttccatatctccagttaatttgccaaaatgtgttgactttatgaaatgattgctttgctgatatgctttgacagaaaatcaaaactgtttaaaatggaataagttagcttatttgacttcttagtcagaaactggtattgatttatttcaacttctcctgccctccaatcccactatagaggttttcattttgagtagtctaatatgctaacccagagatgatgagtaagtttcccctcattttctttccaatctgacattactcatatgcccattctgtaaccataccacaacaataaaaattaattaaaccaaaatacgttcataatttttaaaaataaggataccttctcttagtaataactttacagaagtaggatttaatattattcttttgacttcttttaatatgtcaatataagaaataataatgtttctttatcctttctaatcccatattgaatatattgaagtaattgacaagtcctttttttggatcagttttacccaatttgatataatctcatgtaatctacaggaattcacttgaaggtgaaatttacttgtgggtcttcatctgaaattaacagatagtatcattataataatggtattacatattcataaaattacaatatatttcttaatttctaccaagtgttagtgacagagaaactcattcaaaaagtgtatattattttccactgtttcgaggataaatttattagactgaatttgtgatagtgcttttaaggaagccatagatgatccatagacttccttgcacctgtttttccatccctgcttggcagttagacagaagagcaaggaagctgatcattggattgacccagctttggggtttttcctggaggatgtaaaggaaagtcaggcatactaaatgaaacaaataggaatatcttagaatctgaaatttcctgacctacttgaattgaaagcatcggataggatgtagcttttaactcatttaaactcatttatcatattaattgaagtaacagcaatagtattattccttacatttggtaaatgtacttttggtaaatattaaatcctacttctgtgaggttattactaagagaatgtatccttatttttaaaaattatgaacatattttggtttaactaatttttattgttgtggtatggctacagaatgggcatatgagtaatgtcagattggaaagaaaatgaggggaaacttacccatcatatctggattagcatattagactactcaaaatttggtaaattacaaagctgaattacatatttctgtgtgaatatgtctagttttagttatgattagcacttagatatttacgaattactgattttttacaatttattattttggcttgtgggcaatatgaggaaggaacttgaagcacaaactttggtgcaagcaaaagcaactcatctaggaagaggtagattcactttgacaacattagtaattaacgcaccccttaaaagtaatctcctaataagcatttctgtattttagggtgcagttggtaataaaggtgaatttggtgctcctggaattcctggggaaaagatatgatggtttactctttgatcaaaatttatggttattttataaagctgtatcagataggataggaaaatatacagaacaagtcctatagtttagaggtaatcaaactgtggccctatagtagggctgccagaaactctcactgtaggattttgtacataaagttttactggaacacagccacactcatttgtttttgtattacctaaggctgcctttgtgcttcatggccaagttaagtaattgtggcagagactgtatggcccacaaaatctaaaatatttactctctggccctttgttgaaaaagcttgctgatccctgctccggaacattggctgctattcttttagccccagggcttctcaaattcaccattttatatataatatggtgtcttaatatgtatttcactgcagacaaaaattaggcagtttatgtaaacattttataatatagactataagacatactataattaaaaatataagaaatatatttcagtgtatcaataaaatgctatactgtaggctatagctcataaaatgattgatttttatgtttttcctgtaataccacaaagatgattccaaacaataaattcactcacgagaagttactgttgcagtttagcatcttattcaacttcagtttttgtagaatatttaaaaaattgttgtatttgtatattaaactgcaatcaccttgtcgtatttttccctatatatgcctatattaatattaataactttgctaaatttttaaagttctcatatgttgatgctaagaaaattctcttctttatgaaaatatgcttagtataagtttttgtggcattctagctgcactgattatcaagtgagtccattgtgtcattatctagaaggccatgaccattgtggttttattcacctaaagttagcacagcaataactgaagctgaagcagtaggaggttcagaggttttcagacagatattttttcagaccttcataaatgtgtctctggtatctgatggcttcattgatgctactttttcctttcataaattattcagtctgatatgcaaattctttactcctataggaatgtaactgttaaactcagtaaagtccaacaaactctattgaaaaacaataccttgctgcaagttgatgtttatttgggctgctatcttcttgtataagcttactgatgacattaattgacgattcttcatcataaataaaagcttctttaaatacttgttcaaagttctaattctttaaaaatatcttttctctagagaatattacttgatcacctaaagagatgccccaatctaaatttaccttgtacccttattctaccaatctttttctaaaatgcatcacaataatctgattgtttagatttcagatcattaggagtttttgaattattctgaacatgggaatcttttttaaaacatttgcagaatcaccgaagcgcttgagctataaaatagattgtttgactttattgtgggatgtaacgtgagacttacgtacatttacacaataaattatggcatagcaggatagaattccctttgaatgctttaaaacagaatttatcaaggttggtataaaatagcattaattttaacactccaaaatgacagcccttggatccttatgtatgacaaccaggtgcaaactgctacttattggttgtggaacaggttctcaactcctgaaaaggtgatgtccacagactgacaatataaggactagatgaagcattcagtagaatcaatcctgtcaaaagctgatcaaatgaattgccatccagggccatgatagtaagaaaacaagtctagaaagttaagtatgcaagccaagaaattctctagaagaagagagagtttcttagaaaagagagggcatttagggcaacgtgaaggaactggagcaagtcagtatttcagagacaggcactactcagaactaaaaattttgtttcttttcccagaagtccacttttgtagaaagaatcttgtgtggtgattcatcctatatttcacttaaagtaaaacttcagtgaatataaaggaaaatactgataatctagttagatgaagtcattctgaaaaccaaaatcctcagcccttggtgcccatttggtcaaaatggtgactgagagagtcttgcaaaatcagttaatgagtgtgtctgtgtgaagacactgttcccagagaacttaagaagctaatatcataaagaagcagctgtttttatggtgttctaaaaccatggcaaaattgtcctggcaaatactctttcatgtttcctcaagcagttttcttctgggtctaatttacttgagttactcttaaagggtctcacagacagttagagaattcatgtaacttccagtggtgctaaatatggtaacagattacgtttaactcttggttcccggattcacacatcatcagagaccgtacttagtggttaatatccttccaatacctatagaagcactgagtctttgaccactttctcttcccaaggactcagtccctggtggtgccagctatgattctaacttgtcacttcatttagctgttaaaggggtgtgacactcttgagtgaaaaaatgccgcctcaatagtgttttctcgcttctataatccacaggttaccacttattgaaaataattctaaagaatgtatacaaaatgaaaacaagaaagttactagcgtattatctaacagtaggttaataaattgtaaaattttttttaaatttcaaaattttaaaatcatcctcatgaggtttatgtttggggtgaaatatttctgttattttacaagaaaaatggtttgttagatttttctaagtaaatttccagagaaaaattatcagttcttaacatgtgtgtcacctcagggctttgtatcccacatttgcttcaacgtgaaatatgtgcatcttccagagtaacttatccagcatccccttaactttgactctgcttgtcagcagttataattctttgttttgttttgctttgctttacatagaatcaggagtacttaagagtactgttaaaaaataaataactaggttgaattgtttaactgtttcacttggagcaaaaacatatgtacaataccatagaatatgtatctcaggtctaatattctcaaagtgaagatttttttctaaagttaacatttaagctaggaaactgatttatattaatggagtgaagcatattctgagcagtatgaagtattaatttgtacattaactatactttacacttacatcaatgtcatacttcaataaattaagtgatttgcatataaatcacattattctaaaataaacctacactttgaaatttagctaggtaatagcagtaaattcttttaagtcaagactctgaacaatgtattaatatactgtggtggcatttttcctctgacaccaaggataaaaatagtacactaaacaacacaattttataaaatgtatttatggaatgtggagtcatgaggactctaataaggatgaagtatagcatttagttatgttcttttgtaattgtaatacttatcacccagtacagacttgcagtagacattcttaatctaatattagttctaatctaataaagccttactgttaaacattgcataaaaataactgtcccctttacatttattcagaacagctatgattttgcctaagagattcggtaagtgttctgttatgagttcatttaagaaaatcagttctgtgtagcagtattattaggtagctggcgacttctggtaagcttggatggacagaaggctctgtcaatcaaaataagtaaactggatggttccatttccaagagaagtgaatgactcaaagcatgagatcacatgaatgcagccacacacacacacacacacacacacacacacacacacacacatgttcacaccttgcatcctcatggtatgaagtaggaaaatgagatgaggatttggacactatgagcaaattttgcccactttgcccccaaatataacactcaaatcatgtttgttttcattacctgaatacttcaaacaaaaaagtgcctcatttcatacttcacttatgtatttaaacataaaagatatatttctctagaagtggggatttttttctaagtaggaataattattgtccaataatcttatcctaataatgtgatagtaaaaattgaacaaatatagagcctaatttatgctaaaacccatattctatctactaaattactttaaatttgccctaaaatgtttattttaataggaaaacttttactaagttaattttgctccccatggagtaagtatgaagtaaatcatagccatcattactttactatgctaatattaaatactcagagttagactgcctgggtttgaattccagctcaaaatcttactctctaatttagagcatgacacttggtctctctaaatgtcagttttctcttttataaaacaggaattatattgcatctacttctagctttatcttaaggattaaataagattattcataaaagtgtcagcacctggtatgtaaatatttggtaaacaacagatataattttaacaataaacagtttgatgattctattattctagccttactgtgggaccagattagaacttatttgaaggaatgtatacacttcatcttagccaaaaggccaagaagcaaacacttgggggaatttatattagttattgaaaatatatttacaggaaaatgttaaagtcacatatcttatgtaaccttgacctcttaaaacaaactagatgtcagaaaaccagtgaattcctcacttattataaatatgtacaagaatataaacttttacaataataataataacagccatttactcaaaaagtgttatatgctaaatgctatcaggagccttcttcacattatttcattcactccttacaacacccctgtgaggtaagatttattgtcactatttcacagattaggaaacagatctagagagagagagggaaaaaaaattaaaaacttcccctaacttggtacggagaaaatagtagagtcaggatttgaacctctatccatggaaatccatagctcttgcccctttgccatattacctcatctggacagctcctcaaatattcagatttcatttacacaggcaggtctgaattagatcttaaatttgtttgcctgccagtttagtgagtgaactgcagtttgcttcggacatcctgctccaaggagggctgtgtcccttccctttaaatccaaggaccccttttaaactgtatctgaccctagggattctgactcccccaccttcataagattgtgttcacctattaagaatcattatgcatatggtttttcaccaaatgagagggttttgtctagctttaccttccaaaataagtatcatggaaaaaaatttgcttggtttccaagtacaggttacatttgaagtgtgttttcaaacattccgcgcttgactctctggagattcttaatctaccctgcatgcccacgtccaggcagctcaatcatgggcactctccagattaaccttaatgcaacacctaatgtagaaatttttctcttacattctccaccaaataaatatatataatttatttatcaaaaacaaaattgtttaacttagtaccatggctttataaaaatataaaataaatcaaccttctggaagtaaaaaaagctgtatatattaaagcacttaagaagtacatctgataacatgatgagagagtggccaagctgcatgtcttaaaaatagctggactaactatcatcattatatgaggatatgctttgtatgatgggtcttttcaccataaactctgaagccctcagcactgcagtgagatgagactgaatgaggcagatccattgttccctaacagtctttgtatttcttttctgctggaaaatgaaatgactatgatctttgaatcttgattttccctaaaaagacattttatgagaagactgcagcttcagaaaataaaggcagatgctgttacagtttatgtaagtgcagacaaggccaatcactgttgtgaattataatgaactttctaacagtgctggtccagatgtagcattaatgcttcagagactcagaaacttataggcaagtagtataaaagctagagaattttaagccatttggcttcctctctatatttctagcctcacctaatttttctgtgcttaattttagacttcctaagtttaaaacataatttaaaatgcctaatgcatgtgacaatttattatagaaattgaggccattaaatgaggaggaaaaaaaaagacaacttagctttattctatcaatggaatacttcctgcctatgaaattgttaggctttataaaacaagaatgttttccactttagagaaaaatacctcttaagcagagaatcacctgtatatctgtgtaatttagaaaattctctaatgagtgaaggtatagtcaaatctacacacaggattgaatttttaatcataattagtattcatagaaaaaaatgaccacaaagaaaacagttttgtaagcctacttgttggctttacttgttaaaggtaggagaataaaacttgaattatcagtgaaaaactattgctcttacatggaataactgtcatttaattgtcttatctatagacatatattgatacaatatagcactaaaataagcagaaacataagaaggacaaagtaatagaaggacaggaaaaagaaaaagaaacttgctcactctgcagctgattttatttcttaatggtttcttattcccttctaatgccttccactcacaccccaagtagagcagttggcagggaacacaacagatggatgacaagctcaccacatgccatgtatctggcacccaggcacttgacttttatttgctaaacagtcagatttcaagaacctagtctgctaatgttcctgtttggtttaatgtactaccagcttctagcacgtaaatattaaaatattgccataagaaagctcacacactctgtgtttctctgcatagttaagtggctaattattttattcttggtgtagatactgaacagtggatttaaacatataactggtattttataaagacatctatgattttagatattagagtttccttaaagtggctctatctaaaggagcttttagccagacacatcagggactgccaaagccggtgtaaggtattgaatgaacctgttagggaagactagaagatttgagcagatgatcacagatgattggtatctttcttttctatctccatcactgcattttcagattattaaactcaaaacacatgcatttttttcatgaattctcccaggccaccaggcaaaattacagcttatccactcagctcacatagcactttatttatatcaccaatgtagagtgtgtctatacaccctgctaaaatgtgagctcctggagtagaaggacttggggtctgtctcatctctaatcccagcaactgacccagcgtatggtacctggctggttctggataagtgtttgttgagttgttcagaattcgaggacttagccccaagccagaaatagagaagagaaatagagaatgactgttagaaaacttcgctgaggaaagatcggaaaagcaccccaatgccagcaacacttcagtgaaagtccttcgtactttctacagaagcataatttagggaaacaagggaatctcttctttgcacaacaaagtttacaggtattgcttcctagaattaaatataatagaagtgtgtgcatctccagaatttgctttccattttctcttggagaaagtatgctcttccctctctctcaaacacaaatattcaagttatattgctttctttttatccaaactagatttgaaaatctcctaactttcttacaacattgttagggtgtgttccttctccatatcttcataaccatttacttcagggctaaagataagtaaccaatggcttcagtacatttaaggtccagtagaagtaattgatatggaatagaactataaattactcatcacgaggaatactccaggcaggaaatagttttcagttactgctatatcattgtcctcaattaggagctgactgatgacactgtccttctctttatatcttaaatcatctttcacttgttagaattctgtattcagatgtcaatcactatacttcagatatttcagtagatgattcacattaaataagtatttctgtagtatttttatgaagttttaagtttggtttaaagactctcttacagttagtctcataataaagtgaaaagcccaaacatttgtgcctgacactttcaggaaatcatcacagttacataggagcccagattttgtagtgggttctacaacattgactaaggcttaattctctagctttgctatgtgtaggaagaaacttttacctctccaagacatttcaaaattacttgggttttctttttgtttttttatttgaataactcttagtacaacttgtatttaattaatttgaaaaaggattgtaaaataacatccctttgacaggaaaacttaaggattgtagttgactacaaatgtagcatatgtaaacaatttagttttaaaaagaagcacgttgtattaatagaagtacaaaactgtatagtagccacagcaaagtgtgtgtgtgtgtgtgtgtgtgtgtgtgtgtgtgtgtaagagagagaaagagagagagagagatggtcctgttctgtattctatgtgagtaagaccatttctggaatgatgtgctgagttctgagagccacattttaaaagacatgactgacccgtgtgtgcccagagaacagggaccatagtattaagagactccaaactatcatttgaaaaatgagtggtttactgaatagaaggcttgatagtggcacaaagggatgtcatgtataagacctataactttttttctgtgtaattgcagacagaagaaataagactgatgggcaaaatatggggaaggttaatttgggttcagaaagcatttattcagtaaccacacagtgaattttttttctttgctctccacaatgcaaattaagcagcaaaagtatttgactttaagaagctttcaatagagttggtgcctcatcagattctttggtggagttgttatacataaatgcatgaatttatatttgtccttaaatttaagaatgcccatcctgcttgttttctaggcacatgcacctgtatatacatacatacacacatatacatatacactcaggataatagattttaagagagtagatgttgttagctaccactaaccacccatacatacattaccatgatcaagacatgtattgacccataagaataaataataataggatctaattcatttaagattaaagtttcaaattggccttatcctgagcattaatgtgattaaaatatccctatgcattagccgcattaaggatccaaaaaatataaagaattcaaaaagtttgagattttaaattctttgctatatatatatttttaacttggtaatttatttcttagaatgaagtcccaaaatatagaaggaaaaaattctccccttgaaataaaagcattcagattggatatctgaaaaaaatttaaaaatataggtttttaaaaatttcctgaaacgtttaatggactgccaacagtttaagaaccataaaatatttcaatttctaaagattatggctgaataaagcaggactatagtcagtaatgtagaggtcaccttagtaatacacaaaatcaaaatcagatttacttttttctgcctattttattggttttagtcctagaatcctggcattccacttctgatatttcttctagttatttcatgcaatattcaacttaagtaaattttcttttaataaatatgaactaatgaatggggaagtatgatatatttcaagtggacactaaatttatatagaaggttatactcctagaaaaatatgctctaagtaaaatgataggtcaattttttcagtacagaaatgttataataggatctcggacattttaatcaaaggctgaatgtctaactgttaaaaaaaatcaccacaggatagtatgtaactttctactttctggatcaaatgctggttatttgcaatttttttgtttccctgcttgctttatctttatttgcttggtctcatttatactgggtttgcaaactatagccctagggaatgtgattttttttatcaaatgtccttcagacaatatatgtttcctgcacaataagaaatacattacttccaatgtcaaaagaatcaagaaaactaataatttatagtttatgaccagctatgcttactgttgaaaaatatgcagtgattacaaggacgtaaaattaaatccagtgatcagtttttcagaaagcaaccagctgaccctaaacatcacctaactttgtcccaaaaacttctcaaagaggttattttgaattttggaaagggtactttttgattgtcctgtgaagttaaagacatgctatgtgttatagtaataacccaggcaacgatactatcggcagcaacattagattttgcctgctttatattacacatatttattaacttatcttcctgtagtttgaatttgtacctgaaaaggaatacaagtcctttcatagaaaaccccgtaatgaaaaaaaaaccctcagaaataagttttgaaagttatggtttctatgggaatcatttattgtgattttctttcaataatgaactaaagtattgattggaagccaaagaagaagcatcttatttcttcttggactgaaattttgaggaaggagaggcagcaggagttcagaaaagaaaactaatgtgtaccttccagtaattttaggaggatatttattttatgaatagaattaaatttgccctcaaagtgcttgtggcacctagaactataaacctgggtgtcagagggagcataaagaaagacttcttctgttgacataaggtaggttttagataaacacatttcctatgagataatcagtgatgtccactgagttatcgttgagtctagaattatgtttataaaacacattcagtcaagaaagagcagagaccatttaatgctggccacaggaaaacacagtgttttaattacaacaatcataaaacctgtgtccattaaagacatattctcaatatcacagctctagagagttttggtacccaattaacagtgcatctgggtgtaatcctaacctgacatatggcaggctaggactttgggtgccagtacccagagcacctggtgcatgagtgggctgtgagcaaagaaaaaggggagatactatcacaaccttttttcccaaaaaagtatttttggcagtgtataccgtattggcgtactttaatggataatatgccatatctcatgatcgtatgtaactagtaatatgatataaaacattatactggatcaactgatgaaaataatctgctccttatggacaagtggacatacttctgtgatgagtaacaggagctccatttccatagactgtttcctggcaccaaatacttaatgtgttttcactatcactttatcaaatgatattggaagtttctaatagatttgtgtgatgcctgaggtctaaaactataacaatttgtttaatgatagaaatgtatttattatatagataagtagattatattttgttgattctgtaacatttaattacatttagcagcaaagttttactttagtgtttagtatatactgtgatgatagctgttttaccgtagaatactttgataatttaatctaatctaagaaaaacctcaatctttaaaataatatgtgtgcatgtatgtagcagacatctctggtaagaaccactaaaactgtccttaaaatgttttaattaatgaaataatgaaaaatttccttagatttagacagaatattgctattttaaagtttaaagatgtgacttttttcttcatagattttgaattttgcttaaataattcaaataaatgatagctaattgctttctagggaatgtttaaaaactgttatcttataaattaattgtaaatatttgatagaaataaagcagttccatgaaattgttagcgtattttgagctgtctaaacctggaaactcagaagccaaagtaaattcctataagcaggaaaattcctaaaactctattgagaatatgcacatcctctcaagagtatctcattctagcctgtgtgctgtttacaaaccagacttgtcaaagagatgaccccagaattccagcaatggaaactaaaagccatctgtctttttacccaagacagaaaccagatgaacaggaagaactaaaaagtcttccaagtaattgctttatattaaatggcattgggtatgtattcaaaattgatctaatggcaatcaccagatatgggtaataaagtaaacatgcttgtacatatataagaatacacacacacacacacatatatataatatatatagtgagaaaaaattccgattttaggcaagaagtcacttaaagccagaattaaatctttttccaaagacagtgtaggaaggcagctaggtatgcagagttgaagtgtttgggctcaaattccaagtctaccacctattactgtgcaatgacctgtaagaagttcattgaggcagtattatctgcctgatagttttgttgtcaaaacagcagtgcctggcccatagaaagcacgatgtcagacttcaatattattcccagaagtttcaaagagagaaaatgaaatgagatactaaataacatgtggaaaaacataggctgtaggagacctcagtcccaatcaggtaagttactagttaggtgacctttgacatgttaccaaacctctcggagcctccatttccctattttaaaaattgaggtgacagtcctggatttgagaaataaggaacagatggaaagtccctatgcatgatagatattcagtattaggctacctttccccacaacactagagctatttgttaaagaccacaaaaacgtctatgttcatatatctttatggatcataaacattattctgtgtacttcttttagggtgaaaatggtttacatggtgctccaggattccctggtcaaaaggtaaagagttcttgaatgtttcatctgagttaagaattttaacgtgttaaaaataaatttgcacataatattctgaaattgtatttgattaagctgaattcactcaaagacttttagaaagctatggatgtcttttcaaagagaacttgtggaagcaatcccctcttgaagggaccattctaggaggaagctttatcacagagctttagtaacatgctcctccaaagaactaaatggtagtagtgctttctggggtccgtgatagctgctctggaaacgtttctgcttttattagtcagagtctaaaatgtaaaatagaacaaactgtactccctttgactagttttgttacctcttgcttatcttcttttttgtatatcccagatagagctaaacataatagttagaatgacataaaatattatatattacaaagatgctgtagacaactacctcttcaaaaatatttttctttcagaacaagggattcctaataagcaaggagttttgcatgggccaggctgcctcttcctgtgcctagtatctttctctttaacaagatgaacttcctttgtgcccccacttttttttttttttttttttttttgagacggagtctcgctctgtctcccaggctggagtgcagtggcgcgatcttggctcactgcaagctctgcctccgttcacgccattctcctgcctcagcctcccgaggagctgggactacaggtgcccgccaccacagccggctaatttttttttgtatttttttagtagagatggggtttcaccatgttagccaggatggtctcgatctcctgacctcgtgatccacccgcctcggcctcccaaagtgctgggattacaggcgtgagccaccacacccggccagggctgctttcttcttctgggaagaagcatggttatctgtgacaagcattactaaaaacacagagaccattatattccagtttcttggagggacggggagccacttcaggtggggccagctgtcatgataccatccagataatcccgccgcaggagagagcattattgatgtaatattagatgcccaccaaagccaagcatatcatttctgtgctctggagatgttttactggttttggcaacaacatgtcagaagttactatgcatgtaggtttttctctatagctgaaaatatcttttaaaaagatatgcacttatttatagttacagattgtgttaaagaatttatttacttggcccaataaagataataagattgaactggcagcaatgaaacggcaagcttctgaatttcttcacagcagctctagacaaaacccattaatacagcatgtactgcatctgcgagtcaagttgcaagccaagggatgtgcagatttatctgctgggaaatagttttggactttccagcagctgtttgtggtggctgcatcatgctgacattgtggctgatgtactggaggcgtttagcagcttcaatgtcagcttgaattaacagatcaagttaaagtctatattttaggaaaaatggtagaaaaaaatatagaccatgcattcagtggtgaaaaacaatacctaacaactgacatatattctttcctggtaacttttagagggtagatgaagcaaaaataattatttaattacatgcatgtaacacacacacatatattatttaatcatctaattatattatctaattatgtatactatttaattatataatcataaacatatatgcaattatgtgggtatatatatataaaaaacatactcacaaactaaatatgtatgtatacatgcatgcatgtttctatatagttaaaagctggcattccctttcatataattagtataaattttatgtaccaagggtcaccttgttgaggcattacagaaaaaattctagagatcagaaaccctctatctcctgtctctgtgcactcaggaaatgcttgctgaatgcttcttatgctccaggccctccatgggtggagagatgcacatgacctgttcccaacattcacttgctagctatgttgtcatgagtgcctgacatgtaggaggcactcagtcaacttttgttgagtgtatgaatgaaacaccagttaaggggggagataagcttgtcagatcagagagggtgtagatgaagaaagggagatgtacaccttttagtataatcatggtgattgagagccagcagccctccaaccaccaatcttctttctgtgactgagccagcatagtggacaagaagaagcatagcactggtgtcgaaggtagagccagaacccaagggttcaaacctgaactcattcatcataagacacttaccagaatggtatgccatagaagtcagctttctaagaaggctgtttccactgaatctagtaaaataaatagtaattataagaagaatggctaacttagtctttgccatgaactatgaggatgaatcaaactctcaaaacaaaccattgaggaagatagtattatcatacttattttatacctgagaaaattcaggcttatcaagattaaattgccttggaagtggtgaagctgtaacttataccctagaaaattgttcctttagtatttagaaatatttaaatcttatgtaacaatattggtttagagcttacatgttagaaatggttatttacaattactgatttttcattgtttgaaacataatttttattgtaaaaattgcatgtgttataagtatcatttttattactatacacatcatattcctcttctacagggagagcaaggttttgaaggcagcaaaggagaaactggtgaaaaggtaaatatctctttttacattcacatctgtaaaaagaaattgttcttgaaaatgttttgaaataaaatatttaacttgttttgtgcattccctataagcaattcaataattttatagacataactaaaacatttgcttccattgaggtagaataaatatattaatgattgccagaaatctttcaaaacttatttggatggtattaatagttagatatttctagttaaatttgtttcattgacatggaaatgatttaaacatttataaagcattatatttttatattatgaaatcattcactcactaagtatccaattatttaaataaatgtttgtttttatgtacaactggtttatcagtggaatttttttcctgaaggagtaaataagaacaactaactgtaaaagtcaggatcccacagaaaagacttggcatactaaaactcgaataatttcaaagagtttaataaaggcatggtttaaaaagtacggacaaggtataagaaaaccatagggattgtgcagtatcccaggtcaggttacagcagacctcttaaaccccacataattaccagacccagagacagagaaaagtgtgtggccaaggctggagacaggagctgagggtagcagtcagcccaagataagcacataaaggggaaatcagggcaataaacacctccatcccactatcctctagccctcagctctcctactagcccgcaccagccaaaccaagttgagagccagtgagaatggaggaaacctataaggctcagcctcccaaagtccagagcaggtgtataagggtggacagtggatcatgagagaccaatggcagatgccagcccactaatctaagtgctgtcatttaaagtcaccttcttacaaaactaaattctgggtgcttaattttacatgttaatagagtgttttattataataaataactactgaaagtcatttgatagtgaaaatacttaagcaatcattgttttacaaatttacaactttctattgaaagtacagagaatagaatgcttggtcatccaaaattttccttcagataatcatttgaatcctttttcatttcaaaattcttgttttgtttttaaataaaacaaaaacagtaccattcttttgtttaataactcttgtgtacatcaaatgtatgtatggaattggatggccaggagagctagaaaggagaataatctcaaattggacagtcttgcctgtattttgctttcttgccagtgatcagttgtttgctttttcaataagtatttatagagagaatgagcatctattataattataagacaaagtacacatgttacaaactacatgataattacttttcctcacagaactcagaaagaaaaaagaatggccttataataaccatacttttggagatcatttcattaaatgatgactatttttaaggtgaatatcttttcttagaaatcccttgaacatttttgctttagaataacagccatttggaaggccatgtctttaaataaatgctttatttatacatattcctgatttattaagtgggattttacctgtaggaataagtagtgaataagcctgaacagatatattctctgtaatttaaagtcaccaatacactaaagtcttagtagttgttttgatagtttatatacatagctggtatagctcaataataaatagattctcacaggttataaggcattagaaaaccattcaccgtatttggcttcaaggattttccttgtggttccacatatctattaactgttgcattcaaatagtcaatttcaccacaaggtagaaatatgtttgtagaatgatttaaatatattagaaaaaaataaagcatcaaacagaaaagacaatatgtaccttgaatgagaatcccaatttagatgatttatagtcagatataagattcatgtaataaccgttatgttactttgattggtgcaaaagtaattacattacaccaaccaagtaaaaatgatgttctgctttattatttactgtatattaaatttttgagttttttcaatgttagcatgctacatattctgacccagaaccacatgtattttttcatgagataaataattgaggtcttgtagttcactttatttctagattaaacaagaaaagtctatgaaacattcacattggtgtgacaacagcatggattactcacaacataatttattttctgaacaaagtcaatctaccttggactttaattttttgtggaaaactgagtatataatcattttttaaaaacccactttcttctttaattaccctactgtggcctttactgtgtttaatttgactgtttgagtgacaagtcaccagttgcaaaatacaattcaggacattgttattggtcagagatgtcatatcttccagaaacacatagttacggtcaaaatataaaaattacatcaactgcaaaaggtaaaatactacctgatattttcaggtgacatttctataatgcagtggaaaccaactggagtaatctgcttcttcccattatggctaaaaaaaactagctttcaggccaaccgaactcactagactgacaaagtagctcctcaaagagttgaacactctctccttagtcctgagaaaaacctgtggcactagaacaagtataaaggacctcatttaaagtatatttctgaatctatagaaacttgtaacaacagggcagagcctcatacattcctgaacaaacacaattcagccaaattagtcctgaagtgaaagttattttaaggggtagtaagttctctcagaaaggttgttggtgctgacatgactctctcagatgacagctatttgcaggtttaccatgctgtggtttatcatgtagacctataggaatgaccccatcccacttcaccatccctagctggcaaagttaggtgtgtatcacccaaggatccttgggctctccaacagcatagctcatgaggcaggagggatgaaggaccctctccacagctgagagttgtattttggcttctctctctatataggagtagtcttctggggattttccttagattccttcagtactattattatagtgcaggctgctactacaaacaaaatacggagttcaatcctcagataacagttatccccatactatctgtcagccttcccagcaatgatttcatcaaactcttgttatgtaaccaaatgtaaatgcatgaactaagctcttacattacattagaagccgtccgggaggtggggggcagcccccgcccggccagctgccccgtgcgggaggtggggggcacctctgcccggccgccccgtctgggaagtgaggagcccctctgcccggccgccaccccgtctgggaggtgtacccaacagctcattgagaacgggccatgatgacgatggcggttttgtgaaatagaaaagggggaaatgtggggaaaagaaagagagatcagattgttgctgtgtctgtgtagaaagaagtagacataggagactccattttgttctgtactaagaaaaattcttctgccttgggatgctgttaattataaccttacccccaaccccgtgctctctgaaacatgtgctgtgtccactaagggttaaatggattaagggcggtgcaagatgtgctttgttaaacagatgcttgaaggcagcatgctcgttaagagtcatcaccactccctaatctcaagtacccagggacacaaacactgtggaaggcagcagggccctctgcctaggaaaaccagagacctttgttcacatgtttatctgctgaccttccctccactattgtcctatgaccccgccaaatccccctctctgagaaacacccaagaatgatcaataaatactaaaaaaattaaaaaaaaaaaaaagaaaaaggccatttagcaaggattcattcacgtgctcttcactccttaaccctgagctcaagtttttactttatgtccttgtgaaggtagaaatattacttggttacatttatgaaaagaaacagcaaatagacaatgaaatgtaaacatctgcctcattataccattcaatatttttaagtaattgcttcaaatcatgtaatttagtttgcttttaaaatgatgattattttatgttgtcactcaagttctaacttgaagtttgagaactaattttctcaaagttaaacttaactgcagaacctattgctaaatatcatttgattgtgagaaacatccagtggcaactgctacttataccttacttttcttgatttattacctaaaatgtagtcgacttggttcactgaatagtgatgtttaacttgggcatatatggtggcagattcttacctggatctaagatgcttctgctggtgtggaaattttccatttgggaaatgaaagttttctggtctcttgagggcctcttaagtttgataaaaagaaaaaaacaatcaaatgagcacttcttcgtgaatcataagactgaaggagaggtggagagcatcaaacatgtggcatattctgcagctgtgagagtccatggttgagcaagttcttgctttctcttgtttaggcttctgggcattatctactttgataatctttattgctgatcttttcttccattctgggttatactaataacaataaatgcaaacacaaaactaacaagttcatatggtccctgctttaactcatctcttaaaaccattgttggaaaactagttgtaaatttccagtgacttgtgattttttttattgtcttcttcttaccaaaatataatctaggtcctaaaatgccatatgagatatgtatttaaattagaaaactgtgtttaaatatttattactctggttttatagtggttgcaaatattttttaccagacagaatccactggaaaaacattccacagacccgtattcttagttgatttattgaactctatattgttataaaattccgtacaaaatataatattcaaatgaatacaattatttaaatgtctactataacgtagcgtaaagtacacgtagcgtaaagtacactttgctacccacaaactatctggggttatttataataaagtcatgcatcaaaacatttgtatttcttttatcaccagtcaacatcagctaattttcagatgacataattcaaatttttgtaagccagcctaaaatagaatatatttaggcttggtgctgattgtattagtattgattttattagcactaattttatatgccaccttttgccttcagtggttacttttgaagatgtgatgggggaatggaaaatgcttaatagaaaatgtcttcacttatctatttcataggttaatcattgatattgttttcttatcaaatgaatattaaaaatagcagcagtgaattcattcttgttattctgttgcttttttgttttcagcattaaaaatatatcagcaattatgatatgtctcatatagtcctaggctcataagcttgttggataatttatttggtagcattttgttcatttatttcagatagatagatttaacttttatatttaacttgtaacagcagaaattagataatcagactatttttatactagtaccacaaataaataatgtcacctgcaagcaactttctaaaatattgacttctagcattaaatgtcatgaaattatagtaactcagaaaatcaatagtgatcatttgctactagaaacaacagttatggctttaaataaatgaggatttttaccctgaaaaatctttttacttttgtcaatttctcattcagttgttatggtaattacatgcaggacatgagaatttgaatgagtggttgtgactttgggccacttaaaatttggtattgagtgagaaaaagcccaaataaggatgtttatataatatacgtaaacgattattcaggacattctggggcagcatctagatcactcaacaaggaatcaacattcttagtttctggagtaccactcctgaaagagcctagacttgatgtttattttgaaagtgatggtgacatatcgtaaaataaatggattcacatatttttgtgttctgtgttccagtccagctctgtaatggcagctgtgtgaacttggatatgttcctagctttctttatcatagtttcctcttttataaaataaagttaattactacctcacagaatgactgcaggaattaaatgagtgccggtgaataaaagatgttcaataaatgttaatatcctcagcagccaatatacaaaagtaatataaaatcttaatattttgacaaaaatttatttgacagaattattatatatctttatttgtgtaatattaattcctaatttttcttgtgaataagtaaataaaagacaggaggctatagtagttagctactgatatgtgacaaatcaccccaaaacgtagtgacttaaaacgttcatttatttagcttgtgattatatggtttagaaatttacactaggcttagctcagtgatttttttttgtcttagttgatcttatctacgttcattcatacaattcgcctgtgttatcggcaggttgtgcatccagggactatgcatctgtggattcacccaaccatgaatcaaaaataaatattgagaaataaaaattaaaaataacaatacaacaataacaaataatacaaataaaaaacaatataatctaacaactatttacatagcatttacattgtgttaggtattataagtaaactagagattatttaaagtatatgggaggatatatgcaaatactacttccttttttataagggacttgagcatccatggactttgttatcagcagggatcctggaaccaatccccagcagattctggggcaagagtgtgtatctcttctcagttgccaggttggctgagggtggctgggctagtttggcctctgctagacaacatgtctccactccagatgatctctcatcttccaacagttatcctggacttgtcctcaaggtgaaggcagggatccaaaaagaggaagcagaagcatataaagcctctttagcctccttgctcagaactagcttgcccccacctccatcaccaccatgttctactggccaaagccagtctcaaacccagcctagattcaaggagtaggaaaatagattccacctcctgatgagagaagctgcacggacacattgcctagggtgtaaatatatggagaggtgaaaaaaggggccattttataataaatctaacacaaatgatataaaattttattttaaattaacagtagagtagaaagattaaacagatttatcaactttacttcatttttttccttctcccatggcctaaaatataattcttaaagttaggtttatatagtgggacttgcagactgtgtcaaaacatattttgaatttgaaatggtagaaatactttatatgtaataggaaaatattattttaaaaatcttaattagaatgggaaaaaagaaacacaatatatcaaataattaaaccaaggaatggttttgtacttttacatagcaaaatgtacttattaactttatctaaactaaaactgatacaagaataaatggaaaaaacaagtcaaagttgaaatttttttttaggatttcatgattaaagcttcttggtgattatgcctattatttaaaactaatgcaagtatgttaaatactgctattataaatatagcactttcccttcatcactctaaagcaactgtctacatgttaccttacttcccgtgaattctgtcttggttcaccttgcagagttctactgaacatcagcgtgttatacaattgtttcctttaccctagtaacatgtaaactaaacttctacaatttttaggaaggacttacttgtttgatttgacagctgacttaaaaaataaagagaacagatggagcaaaataataactatgattttaaaaatcatagcaatttatctgtggccaatgataattggtatgggagtaaccatgccaactttcaattatccatggtagcaggcaattgggaaagagtgatggtaatcccacagccaagccagaggcttaatgctagtcattacagattgtgtattattttcctaattccttacagtgctcgtgaataactctaatttatgtgaaatatgtttaaccctctgttgttgcatcacttgctagtagttatagaaaaagtaaaatgtccagagagagagagaaagagagagaaataagaggagaataactataaagggctataatattttatgaacattagtcttttaaagtattattttaatgattgcataatatttcactatataaatacgtaatattttatgtgagcattcccttgttgttagaaatttaagaacatctgttaaatgtgttttcttatttgtgtcactggtgactttagcaaaataattttgatggaatagagagtagaagccaggttggagtttcctgaagagttaaattacaggtgaccgataaagaggccatgcagaaaaaccctcacgagaactagctgtgaagaggacaacagccataggacagtagctggagagggtgtgagtcatttaagaagactttattccaaaatccaaagccatcataaggtccttggcaggaaatattcttgaacaagttaggacccaaaagaaaaacacggactagttcactaatacagagaattccaaacgttttatacttcctaagaaatgtcagactttaggccatcatttttaaggaattcccactaaaatcaagactaagacaaaggtgtaactgctattatttaacaatattctggaatttctgaccaatgtcaattttacttccaaattatagtttaaatctgtctatttctctccatctaccccagtgtcaccaaaccgtaatcattagtcacctcctagttaatctccctgttctcactctttctcattcattttccaaattatggtcagatgcatctttacaaaactattcatgtggcttctattttaaaaacattttagttgtttcccattaggttaaaatcctgaatcccacaaggtcctgcaaagttggacgtagatgtgcttctcagaactcatctcttcccacattccccttttctgcttctattccagccacactgaccttctttcagttacttgaatgtgccaggcgctctcctgactcacagttgtccatcagtgtccccactgctttgaatattttccccttcatttagcttccctctatccacttagcacatcttaaaagtcattttcttggaggcttccttgactctccaatcaaaatctgctccttctgttataatttctcattgtacctttagcactatactgcacctgtatagcatttaccacaatttataattataaatatactggcatgaggattttgtttgtctgtttttctttctccaatagagtagaagcttcaagaaaacaacgaccatgtctgtctgtgtacgtttttatctctaacacctagttgaatgcctagcacacaaaagtattcaattaattcattctttactgtggggaagtattatagagaaagttaagtagtgtttcttttcagcctccagaagtatttaataattattatcttgatgcattcaattcagtatcaaccctatttttttcagactcctactattgaatttgtgagatatagctagggataaaaattaattttacatgtatggcccttagaattgtgtttaaaaagacaatatataaaatataaaacattaatatatttaatagtatgctaaaatttacacaggaaatattgtttaacctagtatatttccaatttttattatttgtgaatcacattgccttttggcaggcactatttagctcataattctataaaataaaatacagttcttttaataccagatattgcaatgtcttttgaatttagtagtaatgttaaaggttgtctactggctcctgtatcataattttactttccaattacagtggaattttgggctgttgactgtagtgaacctaggttagttttgttaaggaaatttattcactcaatattttatgtaatttaagtacaaataaatatgaaagtttggggtcacataagaaagaataaatagaaaaaccatgatcctcatttatgtaatgattaaggcaacttgacttttagtagtttctccttagtcagtgctgggtataaaaggtggttttacaatgtgcctacattttgcttttattttgacctttactccatttatcctatttcttcactccaggctctggagctgcctcaggtttctactcttagcttttggtcttccctttctcctttctcaggatctgcctgtgccatagactccacttcctctgctctctgctgggctccttgtcctcagctgctcattaatctcttcacccccactgctttctttttcatttgtttgacttacctcccatcaagcctgatttccacttcaggttactttctttcattttttcgcatatttttgtattcaaaaacaaggaatagatctcttaggcagtccctcaccacgactgaccctgagcatttctgaatgcagctgagtttaaattgagtaaaggcaactctcacatttgttatgaggtttatacacacagggtttttaatgtataaaaaaaagatgtgtttttttaaattaagaaaaacagaatagatttaaaaatcaagcaatttcttctgcttaatacaatcatcaaatatccataatttctaactgtttttagtaaatctcaattaataaatatgctttattaacaaaaatctcttttttggaagtacattccagatggtaaaaagataattaattcgatgtcaccaaatattacatgacaggtgtgttatttttattcaggagctaccggcatgtgaacttctttcacaatcaatgtaaaagcaattcactgtataggaattgctgaacaagtgtgtcctaccagaccgaaatagcagaattccactgcacagaaaacagaggtgttagtgcagctgctgttccaagtggatgttgtacagtgactagctgttttgtaagttattgtctaggcttatggtggtctattgcttcttagtctaatatcttaaaaaaaatcattggtttttattttccttgatatccttgatatttccttacaatctcctttaagaacctccccatcaatgatctgttctaatatcagtaaaggatcaatgaaacaagacagaaatcaaataatcaatttgctttgtcttttttcacttttccttattgttcctcattttctgctgctaatcattttgtgtaatcaaaactcaaggcaaaatggtaaagcgataatgctttgggcaaacattttgtggaatgttattttaattgcctgcacttgtccagccctggggaggagtgtggcaatgcagatggcttcagctggctgtattccaggaactcactgatagtgattctgcctcccacttaaggtttacttatgtgtacaaatgaatcatgcagttcatgtcttggtaagaactacaaggctggagcacatgatagcacccagtaatcacagagcgaatcaaggattcttccttaagttagtggaaagttaggaagttatctaaattgactttattcctttatccggattttgacaggtggcccaccattatcattaatgtttataacagacaattctaagttctttattttaagccaaaatttgttccgtattattttgaccaatctaatttatcccagttctaatctttcagaccagtgttttctctgattatatgttcttgcaaatgaatgactgaccatcttttggagagtttaagacagcttccttttttttttttttttttttttttgagacggagtcttgctctgttgcccaggctggagtgcagtggagcgatctaggctcactgcaagctccacctcccgagttcgcgccattttcctgcctcagcctcccgagtagctgggactacaggtgcctgccaccacacccggctaatttttttgtatttttagtggagacagggtttcaccatgctagccaggatggtgctgagctcctgacctcgtgatccacctgtctcggcctcccaaagtgctgggattataggcgtgagccaccgcacccagccaagacagcttcttaaactgtctcctaaacatgaagatgcattctcctgaacattttcatgtaagtatctcagttttgagcaagtgtttcactgtgcttcatggatcactgctaatggatcccttgtcttcctcataaccttcatcttgtaatgttataactcatcagtgtactgttagtgtaatgctcagacatggacagaattattctagcactttgagcagtcattcatataggcagtttaatataatgaaggcatttggattttgtggagctgagtcctcatcctggctcctggacagctcaagttatccatggctatttcaatgtcttcacctgtgaaagagacagtgaggctagattaggcctagaatcacacatgtttagagctagagtgaatctgagaatatatagagtttataatactgtcaggtggttgttttcttgagtcacaatataagcatttacatgtatacgtgctgcctttattctggggatttaagcctgatgtttctgtttgttaacgttaaacttttgattctggcaggtattacaatggtaaccttttatcagctctgtagacatgaattctaggtccttgaattttgtagatatgaattctaggccttgagtagctaatataaatattgaataagacatgaccagaacacagcactgtgacacaccactggagttctctttttaggggtgatggcctaatagaaatgaaggtagaatgagcgtatttatttaactacctattatttacctcactaaaatttaaccaacatttatcaaacacatcctaagaaactttattaaatgtcttactgaattaaataaaccaaactcataacacatggtttttgttttctgacatggtattgcctattgataatcatcttattcttaactaagagtttaaaaccaatttgtttaataattaaatctagaattttgctaggaatcagtatgaaacttactcatcattcatgtatattttttaaatgagcaagcattagtgtgtctaggcctttccttctccaagattctcagagattcatctcagtggctaatttccatgagctcttagttatctgcccttaatctgtcctctcctatcttaacgtctgtcttggtctcaagagtggttatctagaattaatgaattaaaaggccttcaatttattttcaaagtagtttgatgccgactataatccaatatgatactgtatccctttgaaacatatgctgggttttggaatatatttgtttattcaatcatccatttatttgatcatttaggacccattttttaccagatactgtgttcagcactagggtagcagatatgaaagagacaaaacatcctttcagagagtagatatgaaatgcttgatggtgttttgtataggacctgtgggaaggaagaggagtgagtacataacgctccctaggagaaggaggggagtttgattaagattctttagtgagtcctgaagcataggtaagagttctccagaacacggaagaggcaaatgaaacagttcattgtaaggtttagagtaagaacaaagtatgagatgtttaaggaaccacatggagtgtcttgagtgacaaaaagaaaaccagtgaccaccagagaaaaaaacaaaaggacttttaaaaaattcctgagtcatagtttcaggcaaaacactcaagggagacaattgccaggaaataacatcaagaggatgcctctgagcattcaggtgatgtcatgtttagctcactcttccctggtagggaataccacctgaccaaaagcttgagggaatcctcttactagaagacccatctgaagccgccagacaaaggattagaggctgatgtccctttgagtcagtgtggcgattcctcagggatctagaaccagaaataccgtttgacccagccatcccattactgggtatatactcaaaggattataaatcatgctgctataaagacacatgcgcacgtatgtttattgcggcactattcacaatagcaaacacttagaaccaacccaaatgtccaacaatgatagactggattaagaaaatgtagcgcatatacaccatgcaatactatgcagccataaaaaatgatgagttcatgtcctttgtagggacatggatgaagctggaaaccatcattctcagcaaactatctcaaggacaaaaagccaaacaccatatgttctcactcataggtgggagttgaacaatgagaacacatggacacagggaggggaacatcacacacccgggactgttgtggggtggggggaggggggaggggggagcgatagcattaggagatatacctgatgctaaatgacaagttaatgggtgcagcacaccaacatggcacatgtatacatatgtaacaaacctgcacattgtgcacatgtaccctaaaacttaaagtataataataataaacttaaaaaaaaaaaagaaaggttcaggctggcttaggtaacaatttaattaaactttttgcttggcatttcccaggaatttctgaaactttctatttttattattcttgcaatttatagaaactgaacatttcaatccagtggaggataatagatgtggcctctatctaggtttattttgctagttaagttcctgaagcaacttaatccaaatattttattttgtccttaattaagaaagaaaagaaagaacatgaaatgtagccatttctttcatgaatcaaacaagatttaatatttgatcatcaagaataagtggtaagtttcttgctttacctgctaataaatggccatggtcatattgaaaaaaaaaattttactgatctaaatttcaataatttactagccagaaacacagtctcttgctgtgatcttgctcctcaaattgtcacaagaatccccagagattctatatgtgttacctctgtgaactgatcagtatgtgagtcaacagcaggccttgctatcattccctcctgattcctgagaagaggagtaagaaatttcaggtataatttgagctggcacctgaaacttttgctatatctctagttaggttgaagtatagctgttgccagatacacgtatacatatagatacatatacatacatatatagagagagagaaagagagagaaagagagacagacacagagataaagagataatgttttgcattttatccaatagataattttttatacgttcatggaacagtttgaaaaatttatgattctttggacaaaaaaaataaaaaactcaccttaagttgaaaagtagacattttgtaagactcattccttgatataaagaataataaagaaaccaatacatgaagaaaacagtcctcaataaccccggaaccaaagagttaatgaaaaggaaaattcataaaaatcaatgcacaagaaaaatactttatataaaacatatggaccatatcaaaagctataatgaaggtgaaaatacatagtgtcaaatctggttattataaagaagaaaatataaaaataatgaaaatatgcttttatcttatataataataataaatagccccgaaacaaaatagtagatgggaattaataaatatggtcactaaaatcaatgaaacagaaaattttaaaaattgtagaagggacaaacaaatcaaacacctgatttaataaatgactaagaaaatgaatacacaaagaattaaattattctattaaggaaacagaaaatagaaaaaagacaagctagaaataagaaaaaaaaatgaccacagatagtagatggacttaaagaattctgagactattgttatatgtgtaatttgaaagaaacaaaaatttgatcacctagagaaaatggatgatttcctcaaaaaatataaaaaattgaccaagaataactggaaaatatgactacactaattactgtggaagaaattggagaggtgattcaaaatctaccattgaataaagcaccaggactaattgggtttttcagcagggttttatgtagccagtgttattttaactattctaggctaaaggaaagatccacagcctccaagaagtcagcataatgttaatactaaatctaattttttaaatataactatattttatttattgttatagatacaagtatttttaaataaatattaccaaacagaattcaaccattcagcaaaagaaaaatcaagtaggataatactatgaagtcaaggtggattcatgttaagaagttatatatatcaacataatacatcagccaattaaagcataaaagttaaatgattatatcagtagatgctgaagcttttgataatatgcaatattcattcctaataagatcttcaagtaaaataggaattgatgaaatatttttactaaaagccagcagcaaatactattcttaaaaagggcaaaaatagattagaaatgaaatatgcagaatttagacttaaggagataaaattgccataaccattacttcacaagaaaattaagtaacctatgtagcactagaaaaaagagataaactacctttttttactaatgagttgactctataggtagaaaatctaagagactttgggagaaaatttagaatttagataccagggatatatttaaaaaacaatagattttgtttattttagccttaaacatctaggaatgtaatgggaaatattccattaatataagtggtaaaagcaataagaattttggaaaaatatgaataagaaagggacaagatgtatacaaacaaaatcaaagggcgtaaaataaaatctaaatgaatgtatgtagatacaccattttctttaaaattataaccttaaaagttcagtaattcaaaattaatacgtaaatgtaatgcaatacaaacaggaattccaacatgttttaaattttgtcttgaagttggtaaaattttttaaagtttatatgaacaaataaataactaaaaatagtcaaaaattttttgagaaagagaaatgtagtaatttagaaatttagggtgaacttgctttaccagacatcataacattctataatgtcatagtaacaaaataaatattgcatcatgtagaataaagatagatagactaaacctgagaatctagaaactggcctcagaagttatgtgaagttaatttaataacttttgtatttttattcagttattcagttgaaaggatgggttattccacaggtgcattggcactaccgagtctatccacgaaaaactattttataccctatataaaaataaatgccagatagatgaaggacttatataaaaatcaaaacaaagcaataaatactttacatttgtgtaatccaggattaagtgtatatctaaccaagatttgaaacccagggactgtaaagtaaaagatagacatattagacatataaaaattaaatgtttcagtggtaaagtcataatcgaaatcaagtaggaaataattgttctgataaaatataattaataggtgaccagttaacatttgtacgttccaaagagtttttaaaagctgagaaaagacaactcaatatttgaaaatggacaaaatgtgtgaataggcagctcgctaaagagaaaaattctaatgctagtaaacatgtgtaaggctcagattcactggtagtcagtgatatgtaatgtaaagcaattatgagatttggctttacagccattagcctgccacctgttgctggatgtgattcaaggacaaaggcattcccatacattgctggtggtaagtgtagagctacagtctcttttagaaagcaactgggtaatatctattcaaaaatgaaaaaaatgcataatctttttacctagaaatcaccttcttgaaaatctgacttatataaatatattacatgcatgtgatggcctttattttttaagtggtataagctttaatacaactcctaacacaaattctgttaaattcaaacatttgctgggttcctagaacagtgctcacagagttggcacacaaatgttataacatagtattacttgttaggtatacaaaaaacaaaccatacagagtttttgccaatgtggaatataatggtgttttgtaggggcagaaaactggaactgagtgagtgtcattaacaagaaaacacctgaatacattatggaacatctatatcatagagtattatagaactactgaataaattaggattctgctgggtaatctaaattgatatgtagaatgtgatgatgagggagaaaataaaaaatgcagaaaaatgtatataatataaccaatttttaaaacaaaagtgattaaaatcctgattgtgcctgtatgtatgtgtgcatctattgtaacttatgatgacataagtttggagtaaaaatttggaaaaatacttacaaacttaaaagttaataacaaaagtctggcatccagaaaaggagtaaaagaaattaaaaagtgagaggagagtatgatttattgtcttacttcagaacttacattatattatatatattcttcatatttaaaaaaacatttaacattcataaattttgtatgtgttttatatttataaacttttaaatttataaatgttatattcataaaatataggtataaatatatatcacattacatacatagatacatgcattgcatatgttcccttgcccatgccaagtcttgcaaagaaaacattttaaaatctgtcctaaaatatatgtttcatgtatttaaggatttatataaaattacaaatatattttaggtaattttttaatttcaagaaaagcacaagagaaatggattaaagataggaaaagcagcaaagtagctgctacaataatacacaaatgaaatgaccaaggagcatgacaaacataatgccaggattgttgccatcattgttgccatcatagcaatgacaatgtgaggatcatggtggaagcagcagcaatttaagaacaaaaatgaagatatagaaagaaaaaaagagggggagttaagaagaataattctgttctgatgcattggtctatttgtctacacttttttatttttattttcattttttgagatggagtcttgctctgtctcccaggctggagtgcagtggcacagtctcagctcactgctacctctgtctcccaggctggagtgcagtggcacagtctcagctcactgctacctccgcctcccaggtcaagcgattttcctgcctcagcctccccagtagctaggattacaggcacctgccgccacacccgactaatttttgcatttttagtggagatggggtttcactatgttggccaggctggtcttgaactcctgacctcgtgatccacctgcctcggcctcccacagtgctgggattacaggggtgagccactgcacctggcctacacttttaacaatacaatattgccaaaatattatagctgatgtttatagtgagtatttagtagggaaaattcctcaccaggctctttaagattatcttgggtatcctagaaccttggcattttcatatcaattttaaaatcaacatgcccggccaggagcagtggctcacgcctgtaatcccagcactttgggaggccgagacgggcagatcacgacgtcaggagatcgagaccatcctagccaacacagtgaaaccccgtctctactaaaaatacaaaaaattagccgggcttggtggtgggcgcctgtagtcccagctactcaggaggctgaggcaggagaatggcgtgaacccgggaggcagagcttgcagtgagccaagatcttgccactgcaccccagcctgagcaacagagcgagactctgtctcaaaaataaataaataaataaataaataaataaataaataaataaataaatataaaataaaatcaacatgccaatttccacacttacatacacacaacttgctgagattttgaatgaattttctttcaatctatagatgtttgggaggaatttaccttgcaatagtatagagtcatccaatccataatatatctatttatttaggtttcctgtattgcctgtaagtaatgtattttaattttcactgtagagttcttacataattttcgttagatttatgactaggtatttgacgtttttgatgctattttgaatacttttaaattttaacttccaattgcttctagtatatcaaaatacattgatttttgtttattgacctgtgtctggccaccttgctttattaactaattaattctaatagttcacagactaccatgcaatttgtgaataaatttctacttctctttacaaatcttatttcttggattttttttcttgccatattttactgactaggacctccactacaatattgaaaagaagtggttatagtgtacattcttgttctttttctaaatttaaggggaaagaattcaatattttatcactaagtatgctgtaggcttttgtagagaccctttcttagaatatgaatattgagaatataatttgctgaattttctttgaatactattcaaatattgaacttaaaaatgctttttccacatctgatgagatggtaatataattttctttctattctgttaatgtggtgaattataatgattgattttcaaatgctaaactacccttggattcctagaataaaattcatttgttaagaatgcataattttttctgtgtataagtggattcaatttgctactatcatgattaggatttttgcacctatgtttataaaaatttaagatttttttttctggtcattttctggtcaaactttgctatcagagttatgctaggatcataaaatgagttgaatactgaataaccccttttcttgtttccagaaggagtatgtgtaatatctgtattaatgtttccttaagtgtttttaagaattcaccaaaaagccacagggtctgaaggtttctttgtgaaagatttttacattatgggtttaattatttattttgattgctttgtttatgtttctcctgaaaatttgaaatttttgctccagtggttataaggagaactacataaaatatagtgaagtttctatttctgcagtcagtgtctattgatttccttccctagaatggctgaattaacatatttccacttcttccatccctgccactctctgatgtcaatgaatgacatatttttagttttaccttggtattgttaatatgcttatctttgttacgtattttggttttaaaggcaacttaagttgattttaaagacaatcttttaacacctcactacaaaagataatggacttaaactacccattattgccaccctctttcctctccttccttctaatttttgtcagatatataattttagcattttttggtattcataatatttacatcctgttcttaagtcgcaagccctaatttttatcttatttttagtcttgtagctaaatgaaacctatgttcattgtcaatcttttgcctgaagtttctgtatcattctcttggttggctgatgtttgcctcctagttttttcacaaaaagttaatgagaaatatatatgcgaaggacatggaagtcccccaaactttgctttcactttatactttaatgacaatttagctgtgtttatagttcttgaaagattatttgtttccttggggacattttagccattagtcttctatcattgagtgtttgaatgttgctcgggagttatctgagattagccagcctaaaacctatttccataggagattgataattttcttcattttaaagaaataattaatgcaaatgtaataaccaaatgtgtaatttaagagctgcatttaagaactggtaacatttgaagaaaaaacattaggtttaatttgggtaggttcaaaatgtctccctacccacttgtagttgggatcagaatacaaagtacacctcaaaacatgtcttttaagggaagaattgtttccttgggtaagataaaacttgaaactgaattcctcactattgaaattttaatagtacaaggttaaaaatggcattcaatatgagttttgttgtgtgggatggttttggaatctttaactgaataattccatttgtttaagtagtgaggtactaactttcagaggaagagactttaagagaatcagttgaaaatgactaatgccaaacatgaaagcagcatcatcatttctttactcattcctcagaagagaaacacccttactgccatccagaggtctatggtccagtggcgagttcagcaacattagcaaagggggtgaaggatgagagatgactcagagacttttcagtcaggtctattgaagagatagcttaatcaggaaaattaggaccactttaaaatgagtatcaagagtggaaagtagagacatgctaataagaagataggacttctgaaaaaaaaagtagctgagtatatatgcaaacagccaggaccctggaacctaagtttccttcaccattactgaacgttttcaaaaattccttaaacttctatttctttgtctaaaaaactgtgaaaattttccttatttcaaaactttgctcagaaatgtctctcctgagagtctttgaaagtttagggcatttaaaaatgcatattattaattttactgagttaatagccattatagtctagtagtgtgtgtaatatatatcaggggacatcttaaaaggcatattatcataaaatgcatatttaaggactttccacctacataaattgaacttaatagattataacaagtctagtgggcccattagggtctttggaaaatacagttcagggccttgttaaaacatatattcttcatgtcatattctacttaaggagcttgcttcagtaacctagaatttgaatatgtttgtcttgcttagtcatgaaaaatgaaaataaagaactctttctttttcagtaagacagtctacaaagtcaggaagaaagcaaattttgccgctaattacattgtttttagtttcaaataacatacatagaaaagtgtcaattaaaataatagctgccagtaaaatgttaaatgacttacacgttttatatatatatatatatatatatatatatacacacacacatatatatatattaatcctccttttataagtcagaaatgtgagggattatatgtttcagtttaagctgaggttattgattgttagttaccaatggatatacttcaatgagaagcattgggtataaattatgtccagtgtttctcataacgtgatctgaaaaaccacctacatcacaatctcgtgggtgcttaaaatgcctgtttctgagcctcattcctgatcccctggatcagaagtctaggcatgtgccttgggaatttgcattttaataaactctcttagagatggttgcataacaactaaagtttgagagcagttattttaatgtgcaaacctatacacataatgtactaaatatgtgaagccctatctagaacgaacttctgggcatatatactttgaccgcagagtttatactacaattccttaaactttcttcaagtaatgcttattttgaaaccagttctggtctccagtgcccaacttggtcttatttagaaagccactgagctttctggctctaagactgagacatggagctctaactttgtagctgcaattggaaaatgcattaataagatatttgagtgcaattgcccattagaaattctatttctaagattttggatactttttgtattttgtttcattttgtgttgtgttgtgttgtgttgtttgagacagtctcactctgtcacccgggctggagtgcagcagagaaaacacagctcactgcagccttgacctcttgggctcaagagatcctcccacctcagcctcccgagtagctgggactacaggcatgacttttgatattccttaaaaatctttttttgttgttgttcaaaatcaagaggcatcatcccaaaggtgtccactcaaggcctatggatattcagcaatgataactgactcttatctgcagcacatcactagctacaccaacacaaaacaaaacacagcaaaataaaatccttctgtcatgttcatttatcctacagtcttcctcaaagtggaattataaaaaatggaattttattatttactaataactctatgtctaaatttgtttttcctgttttctcattttacaagtgcaaacattatcctcttgactcagtgaaaattagacttattcttgacccagacatacggctatactgaaggaaaattcatcattggctactgagaaggatcaactctgatagctgaaataaatttgaaacaaatctcacactagagacttgaaagtccttaaaacgattgcttggtttcacaaacaacactgtgtttttaacatatagaatcggctagaggtccttatgtgcttgtgaaattttccaaatgtgaaagacataagcaccaccgtttgtatcacagctctttctttcactggcttctaggacttgaatctaacaaaatacctcccagctgtgcttaactgccttgtggggttggttcttgattgttggtaaggattccctgccatgcttacttgggagcctcctaacattcttccttctcctggagagagcccctaatggaatggagttcttaataccagaaaattgcctagaaaatttactcaagtagtgggctttctcaacccagggttacagtaaaagggaaatgtgaaaagtttagaattaagtatgaacatctagttctgacatgggaggaataaactgagtacagcatgtaagaaagataattatttggacccttaaagctttaaaccaaatactctgactcatacaggttctggaaaagactcaaaaatggttcactattgaccctgctgtaagaaacagatctttattttgttttttaaagaagttttaaacaccagattcgaaatgacttaaatatgcaaaagtgcagcattattaccattttctttccccattcttatatgttcattctctaactgcagcctcatcagtggtttactacaccaaaggcagtgaaaaggttacatgtcatttcctgtactcctcatattcactagatttgactataaattccatagtgaattacagcaccaccattattaaagtaatataggccaaaagataagcattacttagtgtgcttagtgcttaggattttgcatgaagtatctgaaaagggtcttctgccctccaccatatgtgggcttttaatagttggcttttccttattagttcccagatgagaaattaataaaacaaatgatcgttgctactgataaataaatgctataccggaatcatttgggaaatcactactgcttatgaaaagacttctagcacctcttatacctttccatgtatcagacaagaaagtttactgagttctgtgctagatgctctggtggaataaaaaggaactagaaaacaacacccacgtgttaagagactgataataccgttggagattcaaaacaaacctcttcccctcctccctcagcagtctcaacttgtcttatcagttcaatcatcatctctcaagaggatggttcctaaatctataacctaaacctgatatctttcctggagtctggtctactttacccaactacctgttagacatctcctcctggatgtcccatttattcctttggttcagcatgttcaaaacaaaacccttctgctttcctttcacatctgcttttcttcctgcatttgctcttttctatttgtgctgataacatcaccatccttctgggctttgcacaggtctgaaacctgtaatttttatgaactcttgcttctcccctcttttcctgtcacatctcatttctcatagccgcccttctttttcagccccatggcatttccctaagttctggctttccttgcctttgcctagattgttggaataggtttctaagtaaattacataccgctaagttttttacccactaattttttcctacataactagctccattactctccaaaaagtacaatgccggggttctactcaaaaagagtcagtgcctcctcaatggctaaaagagcatgtccagacatccctaacttgcccttcgtggtttctacaacctgattctgcctgcctttccaatttagtttcatagaattttcctttttcggaatcctgtgctttacctaaagcaagtaacttgctaatccatatatttgtgccttttcttttacttttcccttgttctagaataacgtccctctatttcttttgatgtagatcaagcttgtcccaaccacggcctagaacagctttgaatgtgactcaacacaaattcgtaaactaacataatgagagttttttacttttttttttttttttgctcatcagctattgttagtgttagtgtattttatgtgtggcccaagataattcttcttccaatgtggcccagggaaggcaaaagattggacaccactgatctagatcctacctaaaacatggaaacttgctcaatagccacagaattagactaaaatttaagagccaatttctagaacagaatggtctaggttcaaaccctggctctcccactttactatgtcaaaatactttaccttcctctactttagtttcctcatctctaaagcagagtagtagtacctaatccctagtgctatgatgaggtaaatgagttaaagctcttagactaatgtttcatgtctataagatcttatataaatgctagacttcaattgtgaatgagtaatttttgccttcatttctagagctttatcttgttaagaaaattctcattgcatatcaaaaagcttaataatgaatgtgtacaaatgatgtatctctttatttgtgagcatgtgaagtacccacttataaagactctggtcctaggcataataaaaaattgttagtatggacaatttcaaataaacacaaaagtgtgcagaataaaatattgaacacctgtatatacttcagctgtcttcaattcacagccaatcttgtttcacttagactccatcttgtattattttgaggcaatcccagtcagcatatgtttcagctattaacagttcagtctgtatctgtaaatgataaggcttttgtttttacataatcattatttcattataacacttaaaatttttaaacataactttttaatatcattaagtagtcatttggtgttcaaatttccaatagtatcataaaatcataattttcgttaacaatttgctgtagtcaggatccaaataagataggcacattctagttggttgctgtgcttttgatggtctcttgatctataattttcctccccctctctgtcattttgtttgttttattacattatttgttaaagaatcggggttgtttgtcctgaagaatcttccatagcctggatttgccaactgcagtttcatggtgtactttaatatgttcctctctcctctgtgtttcctttaaagggtggttagatcagtttaggtgtgatgtttttagcaagactacttcataaattgtatggtggtgtgtgccaagagccacataatgtctgaaaatctttctttttgtgatgattgcagccattgatcatcaatatctaggccaattaattcattcagggtcacaaaatggtgatttcttaaaaggatttattcaattttaactttttcttcctttttctgacttctattttaggtttggggggtacatggcaggtttgttacatgagtaaattgtgtgtcacaggggtttggtgtacagattattttgtgacccaggtaatcagcctaatacctgatagatagttttgttattctgatcctcctcccactctctatcctcaagtagaccttggtgtctgttattcccttttttgggtctatgtgtactcagtgtttggctcccactaataagtgagaatgtgcagtatttggttttatgttcctatgttaattcacttaggataatggactctagctccatccatgttgctgcaaagggcatgatctcattcttttttataactgtgtagtattccatggtgtgtatgtagctcattttctttatccagtccacttggatgggcagttaggttgattccatgtctttgctattgtgaatactgctgtgatgaatatatgcatgcatgtgtctttatgatagaataatttatattcctttaagtatatacccagtaatgagattgctgggtctaatggtagtttgtgttctctgagaaatctccaaactgcttttcacagtggctgaaatagtttacattcttaccagcagtgtataaacatttccttttatctgcaaccttgccaacatctgttattttttgacattttaataatagccatcctgattggtgtgagatggtttcttattatggttttgatttacatctctctgatgatgagtggtgttgagcattttttaatatgcttgttggcctcatgtatgtattcttttaagaagtgtcctgttcacgtcttttgcccattttttaatggggttatttggtatttacttgtccacttgtttaactttcttatagattccgggtcttagacttttgtcagctgcatagtttacaaatattttctcccattctgtatgttgtctgtttactctgtgaatagtattttttgtttgttttttgctgtgcagaggctgtttagtttaattagatcatatttgtcaatttctgttttcattacaattgcttttgtcatcttcatcatgaaatctttgccagggctgatgtctagaatggtattttctaggttatcttccagggtttttacagttttaggttttatatttaagtctttaattcatcttaagttgatttttatatatggtgaaaggaaagggtccagtttcaatcttctgcatatggctagccagttatgccagcatcatttattgaatgagtcctttccccattgcttgttttcgtaagccttgtcgaaaatcagatggttgtaggtatgcatctttatttctgggttctctaacctgttccgttggtctatgtgcttgtttttgtaccagtgccatactgaacttgtagtatagtttgaagtcaggaagtgtgatgcctccaactttgttctttttgcctaggattgctttggctaccaaggctcttttttggttccatatgaattttagaatgtttttctctaattctgtgaaaaatgttgttagtagtttcattttgcacttgtatacaagaacttaaagtaaaatttaaaaaaagaaaaaaaaatgttgttagtagtttgatagaaatagcattgaatctataaattgctttgggtaatatggctattttaacaatattgattttttctattcatgagcgtggaatgtttttccatttgtctgtgtcatctctaatttctttcagtagtgtttggtaattctcattgtagagatctttcacttccctggttggccctattcccaggtattttattctttttgttgctactctgaaagggacagtgttctcgatttggctctcagcttggacattgttgatctatgggaatgctactgatttttgtacattgattttgtatcctgaaactttactgaagttgtttctgagatctaggagcatttgggcagagattatggggttttctaggtaaaaaatcatatcttctgtggtgagagctagtttgacttcttctctttctatttggatgtattttatttctttctcttgcctgattgctctggctaggacttccaatactgcgttgaatgggagcgatgagagaggccatccttgtcttgttccagttctcaaggagaatgcttccagcttttgcccattcggtataatgttggctgtgggtttttgtcatagatgactcttattattttgaggtatgttccttaaatgcctagtttgttgaggattttaaacatgaagggaagtttaattttattataagcctttccttcatctattaagatgatcatgtggtttttgtgcttagtcctgtttatgtgatgaatcacatttagtgatttgcataggttgaaccaatcttgcttcccaggaataaagcctacttgatcatggatgattagctttttgatgtgctgttggatttggtttgctaatattttgttgagaatttttgtgtctatgttcttcaaggatattgacttgaaattttctttttaaattgtatctatgccaggttttggtatcaggatgatgctggcctcataggatgagttagggaggggtccctccaccttagttttttgaagtagtttcagtaggattggtaccaactcttctttatttgtctagtagaattggctgtggatctacctggcccagggcttttactagttggtaagcttttcattactgattccatttcagaactcattattggtctgttcagggtttcaatttctttctggttcaatcttgggaggttgtctgtttctaggagtttacctatttcttctagattttctagtttgtgtgcctagaggtgtttatagtagtctctgagggatttttgtatttctgtggagtcagtggttacgtcccttttgtcatttctgattgtttatttggatcttctctctttttttattagtctagctagtggtctatcaatcttatttattctttcaaaaagccagcttttggttttgttgatcttttgtatgtttttttttgcatctctatttcctttagttcatctcttattttggttatttcttgtcttctgctagctttggggttggactgctcttgtttttcaagttcctctaggtgtgatgtttgtttgttaatttgagatttttctagctttattatgtgggtatttagcactatacattttcccctttacaaaagtaaataacatatatggatagtttgtaaacatcttctcaggcagcaactcaaaataatgtggagatagatgataatgatattatgaagtcaagtttattaataaggaatctgaagctccaaaaagttgtgattttaatgatgttaaattcctagctcttttcatcttgttcactctaattgagtgagaatttttagaaagtttatagaagtattaatgcccaagcaaataaagaagaaaatgctctaatccatgtatcctggtcaaacaaggaacgagttaaagacagcaatgagagtagtgagtcattggacctagtggaggtttgcctatgacgcttgtggagaatttctttctagatctgtcattctcactggattcccaggcaacagctgtgacagactaaattgtctctctcagatgagtataaaatttcatcttccttcctcatcagcaaaatgaaatgaaatggagaattttggaaatggcctgaaatattattgcagacattgctataatttggaaattgtcacatgagtacacagaagatttggcagtttcaagaattcattctggatgtggcaccagttccaaatcagcctatgagaccattatttaaaatgccatcactgtattttaccccagatgattcctgatgatattttattcaggagacatttgtgggagatctgctgtgtgcctctatccatttgcatctgagaagaggaagaccagcctaatgattttcagaaatgagcctatgttagcatatctgaccctgcccacggtgtccccacatcctcagacatcaccttaggcctggcttcaccaaagaggcaccttctagttttatctctctacccaggactttttattcctttgtggactcccttcctttgaaaatcaaatgttctctctctcacatacacactctctctttctttctcttaagactcagctaatctgaaaataacttgccccattatttgtcattcgaaatgtagtacccacaagttaaacaaggtgggagggtgagttgtggcatgccaccttgccaacatgttccattgggaccatttctatggatgcattagtttactgccaggtgttagtatttatagaagttatggcaacagttctatgaatgtctcctttatccctctaccacaaaataagcttctaagaagtctggaaattctgagagtatattagccaatgtgagtgatcactatctaatagtatattttccaaaagcctagctttctaaaagagagtcttgaattttagactgtcatacaaatgtcagttaggtagctttcctgccatagcaattagccaagttaactaggtagccaagacaaggataacttgatgatagatggtttgatttaagtaaaaccgtgtgatttttttttttttttaccaaaagcatgctctgggtaagttagcaaatcaaagcaaagactatgtctttctatctggaattccaacaaccatctaaattctttaattatacagataattttgcatttaaaatttttgaagtagtggactattaactagatcttagaaatggtttgtgaaacttcaataaaagtgtttcttgaaagaagatttgattctcatatatgaaatatgaaccaagttaaatgtacaatctattgatacctacatttgtagttactaaagggaattgagataagctgattttatagagttatttcattagattaagtcctttctctccttggagaaataacttaattaggtatatgtcacaaatgcaattaggtgaggaatcttggccctaattcatttagttgaaagaattacgaacaatttgtgacatagcaagtaggtttttatcaagacagtctttttgagatcagctattcaaaaagcaggggcactggactctgaacacaaatttatctcaaactttatctcgattcatctttgtggcctgatgaggtcatcatttgaaaagaatctaggtgaatataatttataatacagtaccttacctataaattcttctttatctcagtattgacacaatactattcaggtggctttaggagttatttgcttctatctgttaaaaatcacaaaggataataatagaaaaagacatgtatattcggacagctatagaggcagacatgtgattagaatcggacctcctgtttccaagcactagactcaggtcactagatcacaattacagctttatgctttggcttggcagttttgaaaagctcttatttttcttagccttatatttgactgccagagacataatcatttctttaccactcatcatgaacaacaaagcactaaattagtatctagtgttaagatggtaagctacaggtatatttaagttaggaaagaatttcttatttggaaaaagaagttatattttgtaacttcctttgtttaactaatttatataggcaggttagtagtacactatacatgtatttttttaatgtttaaatttaaaacatttaggcaaaggagttttgtctaaaataatattccttagcttactgattcttaataattaatcaaaaccaatatattttaatgatttacattactgaaaaactgtaacataagcttatttaaaacctttaaaaaactataacaagcttatttaaaacctttaaaaactacaacataagcttatttacaacctttaaatagagtctgtaaaacagtacattcagtgaaatctagttttattcctattcttctaccttgttagactgtacataatctctctctcaaaaagacttgtgtgtgtgtgtgtgtgtgtgtatatatatgtatgtacatatatagtatgtgtacatatatgtatgtgtacgtatgtgtgtgtgtgtttatatatacatatatatatatagagagagagagagagagagagaaagagaaccaaaagagaatctaacagagtagaaaaaggagaaggatcactgggaaacttaatgcatatgtgggggatatcaaataagcccagcaaaaagaaaaagcaaagaagccttgagaaaggactgcaacattgaatgccttctccaacccacccacagattgatcagaagtggatggaagccttatggacttgaggtgctatcacagcttctgtccaaacaactagacaatgattaggttatttggacacaggggtgatcccaacaaagccagtttaaaaataaaaataaagagaaaaatgggccggatgtggtggctcacgcctgtaatcccaacagaagctgactctgagagggccagggtctcagatactgaatttagcaaagactttacagaaatattgtaaatctgttcaaggaattagagaaaactctgttcaaataattaagtgaaaatatgacaattactcaatctcagtagagaaacagacatcataaaggaaccaaatggaaattctagagtttcagagtacaataatccaaatgaaaaatttactagctagactcacagtagatttgaggtggcagaaggaaaaatcagtgaacttaaatatggataaattgaaatgatctaaagaaagacgagaaagaaaaataataatgaaaaatgaacagagccacaacattctgtgagacgacatcaagcataccaacatgtatgtaatgggaatcccaggagaaaggaagagagagataaataagagagaagcaagagccaaacacttctgaaatttgatgaaaactattaatttatagatgaaactttagagaactccaagtagaataaacacaaagagaaccacgtttagacacatcataatcaaactgctaaaagccaaaaaaaacagtaaattttaaaagcaataacagaaaaacaattcatcatgtacgtgaaaacacaataagaatatagcaatttcagaaagaatggagacaaaaaggccttagaatgacatactcaaagtgcaaaaataaaaaagagattgtcaactatgaattctgtcttcaatgaaactatcaaagatgaaagcaaaaatgaagacattttgaagcaacaaagtataaaatgaattccttgctagcataaatgaactataagagttgctaaagaagtcccacatgcaaatacattataacagacaattttattttttgcaacacaatttatttatttatttatttattttcccctttccccacaatttattttttaatgttttcattatttcacatagaaacttcatccctttagccaggcttggtgtctcatgcctgcagttctagcactttgggaggccaaggtgggcggatcacctgagatcaggagttcgagaccagcctgaccaatggtgaaaccccatctctaataaaaattttaaaaaaactaaccgagcatgatggtgcatacctgtaatcccagcaactcaggaggctgcagcaggagaattgcatgaaccgggaagtggacgttgcagtaagccgagatcactccactgcactctattctgggtgacagaacgagactccctctcaaaaaaaaaaaaaaaaaaagacagaaaaaagaaatttcattcattagaaagtaattcatcattcctacctcctctcacaccttagttccctcattttattgtgaaaatattcaagcatatacagaaagattgaaagaattgtacagtgaacactcatatattcatcactattctacaatattttgctgtatttgttttatcacatccatacatctatccatctctttgttatgtacttcaaagttgcagacatgagtacgtttcacttctaaaatgttaacatgcataacattaattagagtttatgtttatctttttttttttgagactgagtctcactcatgattttggctcactgcaacctctgcctcccgggttcaagtgattctcctgtctcagcctcccgagtagctgggatcacaggtgcacaccaccacactcggataattgttctatttttagtagagatggggtttcaccatgttggtcaggctggtctcaaacacctgacctcatgatctgcccacctcggcctcccaaagtgctgggattacaggcgtgagccaccatgcccggccttcttttttaattgctaaaattaaaaagaccaggtgtagtggctcacgcctgtaatcccagcactttgggaggccaaggcaggaggccacttgaacccaggaattcaagacaaacctaggcatcaaggtgagaccctgtctctacaaaaaaattttttttaaatagctagatgtcatggtgcatgcctgtggtcccaactacttggaaggctgaggctgaagcatcacttgagcccaggaggtcaaggctgcagtgacctgtgatcgtatcattgcactccagcctgagcaacagagtgacaccctgtctcataaaaaaattttttttgattacatttaaaaacctttttagaaacagggtgtcattataacagacaataatttgaattaagaggaagggatggaatgaagaaataaagagcactgaaatttgtaaatacattgggtcaatataaagcattctacatcgtcatcaacaacaaagcactaaattagtatctaatgtaagctctgttaagatggtaagctacaggtatctttaagttagaaaagaatttcttatttggaaaagaacagttacgttgtgtaacttcctttgtttaactaatttatatatgcaggttagtagtacactatatatgtatttttttaattttaaaatttatttttaagttttacttaagtttcaggatacatgtacagtacagaatgtacaggtttgttacataggtatacgtgtgtcatggtggtttgctgcgcctactgacacatcctttaagttccctcccctcaccctccatccctcaacagcccctggccctggtgtgtgttgttcccctccctgtgtccattgttctcattgctcaactcccacttaggagtgagaacatgcagtgtttggttttctgttcctgtgttagtgtgctgagaatgatggtttccggcttcatccatgtccctgcaaaggacatgatctcattcctttttatggctgcatagtattccatggtgtatatgtacaacattttctttattcagtctatcattgatgggcatttgggttggttccatcactttgctactgtaagtagtgctgcaataaacatacgtgtacatgtgtctttatagcagaatgatttatattcctttgggtatatacccagtaatgggattgctgggtcaagtggtatttcttgttctagatccttgaggaaatgccacaccatcttccacaatggttgaactaatttacattcccaccaacagtgtaaaagcattcctatttctccacagcctcaccagcatctgatgtttcttgactttttaataattgccattctgactggcatgagatagtatctcattgtggttttgatttgcatttctctaatgatcagtgatgttgagcttttttcgtatgtttgttgcccacataaacgtcttcttttgagaagtgtctgttcatatcctttgcccactttttgatggggttgtttgctttttttcttgtatatttgtttaagttcattgtaaattctggatattagacctttgtcacatgggtagattgaaaaaattttctcccaactataggttgcctgttcactctgatgatagtttctctggctgtgcagaagctctttagtataattatatcccatttgttaattttggcttttgttgcaattgcttttggtgttttcatcatgaagtctttgcccatgcctatgtcctgaagggtactgcctaggttttcttctagggtttttatgtttttgggttttacatttaagtctttaatccatcttgagttaatttttgtataaggtgtaagaaaggggtccaatttcagttttctgggtatggctagccagttttcccagcatcatttattgaataggagattctttccccattacttgtttttgtcaagtttgtcgaagatcagattgttgtacatgtatggtcttatttctgaagtctctgttctgttccattagtctatatgtccgttttggtaccagtatcatgctgttttggttactgtagctttgtagtatagtttgaagtcaggtagcgtgatgcctccagctttgttctttttgcttaggattgtcttggctatatggggtattctttgattccataagaaatttaaaatagctttttctaattctgtgaagaatgtcaatggtagtttgataggaatagcgctggatctacaaattgttttggtcagtatggccattttcacgatattgattcttcctatccataagcatggaatgtttttccatttgtttgtgttgtctcttatttccttaagcagtggtttgtagttctccttgaagaggtcctttatatcccgttagctgtattcctaggtattttcttctctttgtaacgattgtgaatgggagttaattcatgatttggctctctacttgcctgttgttgttgtaaaggaatgcttgtgatttttgcacattgattttgtaccctgagaatttgctgaagtggcttattggcttaaggagtttttgcgctgagatgatggggttttctaaatatgaaatcatgtcatctgcaaacagaaaatttgacttcctctcttcctatttgaataccctttatttctttctgttgcctgattgccctggccaaaatttctgatactatgttgaataggagttgtgagagagggcatctgtgtcttgtgcctgttttcaaagggaatgcttccagcttttgcccattcattatgatattggatgtgggtttatcataaatagctcttattattttgaggtgtgttccatcaataactagtttattgagggtttttaacatgaaggatgttgaattttatcaaaagccatttctgcatatatagagataatcatgtggtttttgtctttggttctgtttatgtgatggatttcatttattgatttgcacatgttgaaccagccttgcatcccagggacgaagccaacttgatcatggtggatacgttttttgatgtgctgctggattcggtttgccagtattttgttgaggattttgacattgatgttcatcagggatattggccttaagttttctttttttgttgttgtgtctctgcccagttttggtatcaggaagatgctgacttcataaaatgagttagagaggagtccctctttttcagtttcagaaggaatggtaccagctcctccttatacccctggtagaatttagctgtgaatccgtctggtcctgggctttttttttggttggcaggctattaattactgcctcagtttcagaacttgttattggtctattcatggtctattcatcctggtttagtcttgaaagggtgttttttaaaatatatttatatatatatatatctatttcttctagattttctagtttatttgtgtagaggtgtttatagtattctctggtggtagtttgtatttctgtgggggtcagtggtgatatcccctttgtcactttttattgtgtctatttaattcttctctcttttcttctttattagtctagctagtgatctatccatgttgttgttggtttttttttttttttcctcaaaaaagcagcacctggattcattgattttttggagggtttttcgtgtctctatctccttcaattctgctctgattttagttatttcttgtcttctactagcttttggattagtttgcttttgcctctctagctcttttaattgtgatgttagggtgtcaatttgagatctttctagctgtcttatgtgagcattaggtgttatataaatttccctcttaacactattttagccgtgtcccatagattctggtaagttttctctttgtttttattggtttcaaagaacttgatttctgccttaatttcattatttacccagaagtcattcagaggaggttgttcaatttccatgtaattgtgtggttttgagtttcttaatcctgagttcaaacttgcttgcactgagagactgtttgttatgatttcagttcttttgcatttgctgaggagtgttttacttccaattatgtggttgattttagaataagtgccatgtggcactgagaagaaagtatattctgttgatttggggtggggagttctgtagatatctattaggtccacttgatccagagctgagttcaagtcctgaatatcctttttaatttcctgttttattgatctgtctaatattgacagtggggtgttaaagtctcccactattattgtgtgggagtctaagtctcttttgtatgtctctaagaactcgttttatgaatctgcgtgctcctgtattgggtgcatatatatttagaatagttagctcttcttgctgacttgttccctttgccattatgtaatgcccttctttgtcttttttttttaatcgtagttggtttaaagtctgttttgtcagactaggattgcaaccctttctttttgttgcttgccatttgcttagtaaattttcctccatcactttattttgagcctttgtgtatctttgcatgtgagatgggtctcctgaatacagcacagcaatgggtcttgactctatccaatttgccagtctgtgtcttttaattaggtcatttagcccctttacatttaacgttagtattgttatgtgtgaatttgattctttcatcatgatgctatctggttattttgcacattagttgatgcaatttcttcatagtgtcattggtctttatattttggtgtgtttttgcagtggctggtaccagattttcttttccatattcaatgcttctttcaggagctcttgcaaggcagacctggtggtaacacaatccctcagcatttgcttgtctgtacaggattttatttctccttcacttatgaagcttagtttggctggatatgaaattctaggttgaaaatcctttcttttaagaatgttgaatattggtccccattttcttctggcttgtacagtttctgctgaaaggtctgctgttagtctgatgggcttccctgcataggtgacctggccttctctctggctacccttaatattttcttccttaatttcaaccttggagaatctgataattatgtgtcttggggttgatcttctcaaggggtatcttagtggcattctctgtatttcctgaatctgcatgttggcctgtcttgctaggttgaggaagttctcctgtatagtattctgaagtgtgttttccagcttgtttccatgctcctcatcatcttcaggtactccaatcaatcgtagtttggtcttttttacaaagtcccatatttcttggaggctttgttcattccttttcattctttttctctaatcttatctgcatgccttatgttagcaaggtggtcttcaaactctgaaatcctttcttccacttcacaaagtgtaatgctctgtgtatgcttcatgaagtactattgctatgcttttcagctccatcaggtaatttatgttcctctctaaactggttattctagttagcagctcctcaaaccttttatcaaggtttttagcttgtttgcattgggctaaaacatgctcctttagctcagcgtactttttttttttttttgacggagtcttgctctgttgccgcccaagctggagtgcagtggctcgatctcggctcactgtaagctctgccccccgggttcatgccattctcctgcctcagcctcctgagtagctgggactacaggtgcctgccaccacacccagctaatattttgtatttttagtagtgatggggtttcactgtgttagccaggatggtctcgatctcctaacttcatgatgtgcccgccttggcctccctaagtgctgggattacagcatacttttttattatccatcttctgaagcctacttctgtcaattcttccatctcatcctccgtccagttctgtacccttgctggagagatgttacaatcatttggaggagaagagacactctggccttttgagttttcaacattttttcattgattgtttctcatcttcatgagtttgtctagttttgatctctgaggatgctgacctttggatggattttttttagggacttttgtttttcttgatactgttgttgttgctttctgtttgtttatttttctttcaatggtcaggtacctcttctgtagggctgctacggtttgctcggggttcacttcaggccctattcatctggtttgctcccacacctggagatgtcactcaaggagtctggagaacaacaaagatgggtgtctgctccttcttctgggatctctgacttcaaagggcaccaacctgatgccagtaggattgctcctgtatagggtgtctaacaacccctataggagggtctcacccagttgggtggcatcgggaacaggacctatttaatgaagcactttgtcccttggtggagggggtgtgctttgctagggggaaacccacttgtctgggctgcccagattcctcagaactaccaggaggaatggttaagtctgctggtccacagagactgtggtcactcgccccctgcccaggggctcatgcccagggagatccaggttctgtcccggagcctctggctggagttattggacttcctgcagggaagaactgcccagtgaggaaggatgagtcagagtcaggcctgaagaggctctctggctgcagtctgccacagccagtgtgtcaggctttgggggatacctattgggaccaagccattcagtctcccttgaaaagcacagactgaaaagcccttgaaaagggctttttcagtctcccttgaaaagcccttcccccacccaaggaacttagtgtgttaggcagttgtgagtcccagtgctggctgctaccccttcctcagggagctcaaatggcttagacagtaagccacagctgtggggctggttgcccctcaccctgggagctcagcaggcttaagcagattccagctgagagcctgttgagaatctgcgcagctctggggttgggaccctaagctctggtggtgtgagtttgcgagtgggattttcccatccatgggttgcacagttctgtgggaaaagcatggtttccctggctaggcagcatgctcactcaccacttcccttggctggggggtgagggctcccctggctctcaggtgggctgctgcaccacactgctcttccttcctctctatggatcatgccagtcacctagtcagttctgatgagagaatctggataccttggttgccggtgaaggattcacacgcttattatggttcttttctatgggagcctctgattgccgttgtttctagtcggccatcttggccccatccaaatttttaaatttaaaatatttagatagatgactataattgtatttgtcatgtcatatatttgcgtttgtatagtcatagatatatgactatatttgtatttttcttctaattttttaaaaaatataatgttaaagcaataactattacactacactgttacatttataggatatgaatatattatatatgatatcaatgatacaagaaaatggagaggaaatacatctaaactgaaatttgccatagttttctgaaattaagtcaatgttaactggaatagattatgataaagtaaagatgcatattgtataatcactttaaaaatttcaaaaaaagctaaaaatttatgaaaaactaaaatagcatgctaaaaatatttgttgaacaaaaatgaaggcaggagagaaagaacaggggagcaaaaatgattacacttatagaaataactaaataacaaaatagaaacctttacccaacccaatgttagaaaatatttttctatgttttgttctataatttttatagctttggaatttacatttgtgtccattgttcatttgagttaatttttgtgtagggtgtgatttatgaatcaaagttaattttttgcacatagatatttgccatatcaataattacattaaatgtgaacagaataaatacatcaaaaggtaaagaatgtcagattggattttacaaagcaatatccaactatatactatctacaagagatatggatgagattcaagatacaaacaggttgaaagttaaaggatatatacaaagatgtactatgtaaagagtaaccacaagaaatatggagtgagtataatagtattacacagactctatgacaagtgacattattggagacaggaaagaatattttatataatgataaaagggccaatatagcaggaagatatagcaattattattgtgtatgtacctaacagagcctcaaaatgcatgaagcagagacggacagaaatgaaagacaataggcaattagaaataaatagaaattagaaagaagcaattaacacaattatatttaaagatttcaatactcctctctcaataagaatatagtagacttgaataagcctacagtacactcatctgaactgacattcataaaacactccacccaacaataataaaatacacatttttccaagtgcatataaatcatttaccaagatagactatattctccattactaaatgaatcacaatacattttaaggattcaagttatataaagtatgtttttggtcacaatggaattaaattcgacatcaatattagaaaaaatctctattaaatcttcaaatgtttcaaaatgaaaaaatatgattctcaacaccctgtaggtcaaagaaggaatcaaaaggaaaatttgaaaacattttgagcttaataaaaataaaaacaagtttagttgtatagatttaaatgcttatattagaaaggaataaaaattgaatgttaataatctaagtatccacctccaagaatatggaaaaaagagcatatcaataaccaagtatgtagaaggcaggaacaataaaatcagagtggaaataaaataaaaatgggaaaaaaataactagaagaacaatacagaaaactaataccatcaaaagttggttctttgaaaagatcaacaaaattggtgaacttctagccagactgatcaggaaaaaaaaaggaaagaaaaaattaccagtaactacaatgagggaggggacaccactacagaccctacagaaactgaaaggcttacaagggaatattatcaatgagtttaggctaataaattctataatacagataaaatgtacaaattcttagaaagtcaaaaattaccaaaactgactcaagaacaaatagaagaattgtatagtcctatttcagttgtatacattgtaatagttaaaatcttgctattaaaaaaagcttagattcagatgtctttaattctatcagatgtcttcatctttatttgaaatgagaccaatcctacacataattttttcaaaaatcaaaaaggagggaactcttcctacttcattttatgaggccaatattactctgatactgcaagtcaaagacctcagaaaagtccataggccaatatctctcataaagagagatgcacacacacacacacatatacataaaaaaccacttaacaaatattagcaaactgaatccaataacatatagaaacaattataaaccttgaaagagtggtttaacatttgaaaatttgttgatgtcatgcaccatattaggaaataacaaaaccaatatgattacctcaatgaattcaggacaaaatattttttcaaaattcaatacccattcaacaaattaagaatagaagagcagtttgtcactctgataagagggatttgtgaaaacaaaaattgtgagtattatctttcacttaatggtgaaagactgaactctaagatcaggatcaatacaagaatatccactatcctcatttacattcaatattatcctggaggttctagccagtgtaatactgcaggaaaaagccattaaagacatataaaatggaagagaagaagaaagcccatctttattcttagatggtataatcttatatgtaaaaaattctgaagaatctacaataaaagattacaattcattagcaagtttagcaaggttgcaggaatcaaattgaatatacaaatttttatttgatttccgtatacaagcaacaatcaatcaaaaaaatgaaattttgaaaacaattttatttatggtgatgacctgtacacagatgactaaaaaacattgctaaaagcaattcaagaagacctaaataaatgtagagttgatttgtggtttggaagacccagtattattaaggtgacagttctttagatattgatctatagattcaaggaaatctcaatgaaaatctgaagcatttttgcaaatgcaacaaatttttctagccatcatgtgtaaatgcaaatgacctggtatagccaaaatgatttttaaaaaaataacaaaactgaaggactaatattacctgatttcaacatttatcataatgataatcaaggaagtgtggcatcagcttaaagatagacaaatagacaaatgggaaataatagagtcaaaatgtaaacccacatatatctagacaaatggctttcaacaggggtacaaaaataactcagctgataataaatagcttttttcaacaacccttttatatggttggatttgcatgtttaagaaaaagaaagacaagaacttcaacccatacctcccacattatagaaaacttacttaaaataggtaatagaaataaatgtaaaaaccaaaactgtaaattttttagaagaaaatacagaataaatactttgtgactttaggttaggcataggtttttaactatgacactaaaaagtcaatcaatgaaagaaatagttaaaaatatttcttctttgaaagacactgccaggagaataaaaagacaaagcacaccatgggagaaatattttcaaattacatatatgataaaatgacttttatccagaatatataaatagctctaaacaaacaatccaatttttaaaatgagtatgattgtaatagcactccacacgaaagatatatgaattgcaaataaactcatgaaaagttgttcaacatgattagtcattaggaaaatcaaaacaaaacaaagcaaacgagggaggagccaagatggccgaataggaacagctccggtctacagctcccagcgtgagcgacgcagaagacggtgatttctgcatttccatctgaggtaccgggttcatctcactagggagtgccagagagttggcgcaggccagtgtgtgtgcgcaccgtgcgcgagcggaagcagggcgaggcattgcctcacctgggaagcgcaaggggtcagggagttccctttccgagtcaaagaaaggggtgacggacgcacctggaaaatagggtcactcccacccgaatattgcgcttttcagaccggcttaagaaacggcgcaccacgagactatatcccacacctggctcggagggtcctacacccacggaatctcgctgattgctagcacagcagtctgagatcaaactgcaaggcggcaacgaggctgggggaggggcgcccgccattgcccaggcttgcttaggtaaacaaagcagccaggaagctcaaactgggtggagcccaccacagctcaaggaggcctgcctgcctctgtaggctccacctctgggggcagggcacagacaaacaaaaagacagcagtaacctctgcagacttaagtgtccctgtctgacagctttgaagagagcagtggttctcccagcacgcagctggagatctgagaacgggcagactgcctcctcaagtgggtccctgactcctgacccccgagcagcctaactgggaggcaccccccagcaggggcacactgacacctcacacggcagggtattccaacagacctgcagctgagggtcctgtctgttagaaggaaaactaacaaccagaaaggacatctacaccgaaaacccatctgtacatcaccatcatcaaagaccaaaagtagataaaaccacaaagatggggaaaaaacagaacagaaaaactggaaactctaaaacgcagagcgcctctcctcctccaaaggaacgcagttcctcaccagcaacagaacaaagctggatggagaatgattttgacgagctgagagaagaaggcttcagacgatcaaattactctgagctacgggaggacattcaaaccaaaggcaaagaagttgaaaactttgaaaaaaatttagaagaatgtataactagaataaccaatacagagaagtgcttaaaggagctgatggagctgaaaaccaaggctcgagaactacgtgaagaatgcagaagcctcaggagccgatgcgatcaactggaagaaagggtatcagcaatggaagatgaaatgaatgaaatgaagcgagaagggaagtttagagaaaaaagaataaaaagaaatgagcaaagcctccaagaaatatgggactatgtgaaaagaccaaatctatgtctgattggtgtacctgaaagtgatgtggagaatggaaccaagttggaaaacactctgcaggatattatccaggagaacttccccaatctagcaaggcaggccaacgttcagattcaggaaatacagagaacgccacaaagatactcctcgagaagagcaactccaagacacataattgtcagattcaccaaagttgaaatgaaggaaaaaatgttaagggcagccagagagaaaggtcgggttaccctcaaaggaaagcccatcagactaacagcggatctctcggcagaaaccctacaagccagaagagagtgggggccaatattcaacattcttaaagaaaagaattttcaacccacaatttcatatccagccaaactaagcttcataagtgaaggagaaataaaatactttatagacaagcaaatgttgagagattttgtcaccaccaggcctgccctaaaagagctcctgaaggaagcgctaaacatggaaaggaacaaccggtaccagccgctgcaaaatcatgccaaaatgtaaagaccatcgagactaggaagaaactgcatcaactaatgagcaaaatcaccagctaacatcataatgacaggatcaaattcacacataacaatattaactttaaatataaatggactaaattctgcaattaaaagacacagactggcaagttggataaagagtcaagacccatcagtgtgctgtattcaggaaacccatctcacgtgcagagacacacataggctcaaaataaaaggatggaggaagatctaccaagccaatggaaaacaaaaaaaggcaggggttgcaatcctagtctctgacaaaacagactttaaaccaacaaagatcaaaagagacaaagaaggccattacataatggtaaagggatcaattcaacaagaggagctaactatcctaaatatttatgcacccaatacaggagcacccagattcataaagcaagtcctcagtcacctacaaagagacttagactcccacacattaataatgggagactttaacaccccactgtcaacattagacagatcaacgagacagaaagtcaacaaggatacccaggaattgaactcagctctgcaccaagcagacctaatagacatctacagaactctccaccccaaatcaacagaatatacatttttttcagcaccacaccacacctattccaaaattgaccacatagttggaagtaaagctctcctcagcaaatgtaaaagaacagaaattataacaaactatctctcagaccacagtgcaatcaaactagaactcaggattaagaatctcactcaaagccgctcaactacatggaaactgaacaacctgctcctgaatgactactgggtacataacgaaatgaaggcagaaataaagatgttctttgaaaccaacgagaacaaagacaccacataccagaatctctgggacgcattcaaagcagtgtgtagagggaaatttatagcactaaatgcctacaagagaaagcaggaaagatccaaaattgacaccctaacatcacaattaaaagaactagaaaagcaagagcaaacacattcaaaagctagcagaaggcaagaaataactaaaatcagagcagaactgaaggaaatagagacacaaaaaacccttcaaaaaatcaatgaatccaggagctggttttttgaaaggatcaacaaaattgatagaccgctagcaagactaataaagaaaaaaagagagaagaatcaaatagacaaaataaaaaatgataaaggggatatcaccaccgatcccacagaaatacaaactaccatcagagaatactacaaacacctctacacaaataaactagaaaatctagaagaaatggatacattcctcgacacatacactctcccaagactaaaccaggaagaagttgaatctctgaatcgaccaataacaggctctgaaattgtggcaataatcaatagtttaccaaccaaaaagagtccaggaccagatggattcacagccgaattctaccagaggtacaaggaggaactggtaccattccttctgaaactattccaatcaatagaaaaagagggaatcctccctaactcattttatgaggccagcatcattctgataccaaagccgggcagagacacaaccaaaaaagagaattttagaccaatatccttgatgaacattgatgcaaaaatcctcaataaaatactggcaaaccgaatccagcagcacatcaaaaagcttatccaccatgatcaagtgggcttcatccctgggatgcaaggctggttcaatatacgcaaatcaataaatgtaatccagcatataaacagagccaaagacaaaaaccacatgattatctcaatagatgcagaaaaagcctttgacaaaattcaacaacccttcatgctaaaaactctcaataaattaggtattgatgggatgtatttcaaaataataagagctatctatgacaaacccacagccaatatcatactgaatgggcaaaaactggaagcattccctttgaaaaccggcacaagacagggatgccctctctcaccgctcctattcaacatagtgttggaagttctggccagggcaatcaggcaggagaaggaaataaagggtattcaattaggaaaagaggaagtcaaattgtccctgtttgcagacgacatgattgtttatctagaaaaccccatcgtctcagcccaaaatctccttaagctgataagcaacttcagcaaagtctcaggatacaaaatcaatgtacaaaaatcacaagcattcttatacaccaacaacagacaaacagagagccaaatcatgggtgaactcccattcacaattgcttcaaagagaataaaatacctaggaatccaacttacaagggatgtgaaggacctcttcaaggagaactacaaaccactgctcaaggaaataaaagaggagacaaataaatggaagaacattccatgctcatgggtaggaagaatcaatatcgtgaaaatggccatactgcccaaggtaatttacagattcaatgccatccccatcaagctaccaatgactttcttcacagaattggaaaaaactactttaaagttcatatggaaccaaaaaagagcccgcatcgccaagtcaatcctaagccaaaagaacaaagctggaggcatcacactacctgacttcaaactatactacaaggctacagtaaccaaaacagcatggtactggtacaaaaacagagatatagatcaatggaacagaacagagccctcagaaataatgccgcatatctacaactatctgatctttgacaaacctgagaaaaacaagcaatggggaaaggattccctatttaataaatggtgctgggaaaactggctagccatatgtagaaagctgaaactggatcccttccttacaccttatacaaaaatcaattcaagatggattaaagatttaaacgttaaacctaaaaccataaaaaccctagaagaaaacctaggcattaccattcaggacataggcgtgggcaaggacttcatgtccaaaacaccaaaagcaatggcaacaaaagacaaaattgacaaatgggatctaattaaactaaagagcttctgcacagcaaaagaaactaccatcagagtgaacaggcaacctacaacatgggagaaaatttttgcaacctactcatctgacaaagggctaatatccagaatctacaatgaactcaaacaaatttacaagaaaaaaacaaacaaccccatcaaaaagtgggcgaaggacatgaacagacacttctcaaaagaagacatttatgcagccaaaaaacacatgaagaaatgctcatcatcactggccatcagagaaatgcaaatcaaaaccactatgagatatcatctcacaccagttagaatggcaatcattaaaaagtcaggaaacaacaggtgctggagaggatgtggagaaataggaaacacttttacactgttggtgggactgtaaactagttcaaccattgtggaagtcagtgtggcgattcctcagggatctagaactagaaataccatttgacccagccatcccattactgggtatatacccaaatgagtataaatcatgctgctataaagacacatgcacacgtatgtttattgcggcactattcacaatagcaaagacttggaaccaacccaaatgtccaacaatgatagactggattaagaaaatgtggcacatatacaccatggaatactatgcagccataaaaaatgatgagttcatatcctttgtagggacatggatgaaattggaaaccatcattctcagtaaactatcgcaagaacaaaaaaccaaacaccgcatattctcactcataggtgggaattgaacaatgagatcacatggacacaggaaggggaatatcacactctggggactgtggtggggtcgggggaggggggagggatagcattgggagatatacctaatgctagatgacacattagtgggtgcagcgcacaagcatggcacatgtatacatatgtaactaacctgcacaatgtgcacatgtaccctaaaacttagagtataataaaaaaaaaaaaaaaaaacacatgaaaaaaaaaaaacaaaacaaaacaaagcaaacatggaaatgtttgttattttaattgttatgatggtttcatggctgtttgcatgtgtcaaaactcatcaaatttgtgtacgttaaatatgtgaaacttattgtatgctggttacacctcaataaagctgttaaatttttttaaatttaaaaatattatttcaagaataaaataaccaaaccatattctgggagcaagtatttgcaaattatatatctgataaatgacttgtatcaataatacataaagaacttttacaactcacaaataagaaggcaaactaaaaatggaaaaaagatttaaatagatgattcttcaaagaagatatgtgaatgtctaacaagcagaggaaatgatcattaatcattaagaaaatgcaaattaaagccacaatgaaatactatacatccactaaaatggctataatcaaaaagattgacaaaattggtgagaatatgtggaaatcaggaaccctaatacactgctgatgggaatgtaaaatggcactttggaaactggtttgggaatttcctagaaagttaaacacatacttacctattatgacctagcaattgaactcctgggtatttacctaagaaaagtaaaaatctgtgtccacaaaaagatgtttattttattgttcatggcagcattatttagaatatctaaaaataagaaactggtgaattaataaataaaatatggtgtacccacataaatgatactactcaaaaagaaacaaactacttagccatgcaacatgggtaaactcaaaagcataatgttgaatcaattaagctagacaaaaaaggctacatattgtataattctatttatatgaaatttctagaaaaaagcaaaactatagagacaaaaactatgtcagtagttttctgggactacaagagtgagaagcagttgactacaaatgggcacaaggaaacttttttaggtgatggaagtattttagtcttaggttgtggtgatgggtgcagacctatataaatttactaaaactattgcaccctacatgtacagtgtatcagtattatggcaagtaaatcataccttaataaaactgttagctaaacaataaaaaagatatctatgctggaagtaggaacatgagactcattagcatatagatgatcattgtagctgtaaaagtagagaaaacatctagggaaagtttgttgaaagggaaaacataagaagctgggacagatccctgtggagcagcaacacttagaggatctagcaaaaatgaaaatgagtaaatgcagctacagaggtagaataaaaatgaaggaaatatagtatcacagcaagtaagtatttctaggagggggcttgtcataaagatatcaaatgcttcagataggttaaggaagaaaaagactaaaaggtgtctgatggtggtcacccaagaccttggcatgagcagtttttgaggaccaaataaggtacaagtcaatctggagtgaactgcagagtgagtgggagtaatgaatgcaaacaggagtattgggagcctggctcaagaagtttatctgaaaaaggaaggatttccttccaggtgaagctggaaatgacaggatatagaagtgcaagattttgttttaacagaagattcaacagcatgtttcagtgtggttagaaagaagtgagggagaaaaggctgaagattcagaagagggccataatgagggagcagaaaaagataggattgaaaacacaggttgaaagattaccattaaacagtaaggaataattgttccatgtagaagagtaaagaatggttttaaaataagtgaatttgtagatttcatggcatcaaggaaaggcttgtatgatggcttcttttttcttggtagaaagcaaggtttttgagagtaaaagcagaagtcataataccaaggatttgaggggaatggcactctttaaggacctagaattaggttagtgatcatgaatttataataataccagtctacccaattgtatattttttctctaggaacaagaggtggacagtttgattcactggagttagctccatcagaaagctagtagagcaagggtgtttagagtggtggtaacaaaacacttggaatgacagatcatggatggacaaaagtgaaggcattgggggctgatagacattgtcttcacttgcattcccctgaaacaaggtccgagacaatgactttaggtcaggtagttgatttgagagggagctcaggatacaggagtgacggaatggggaaaataagtcaggaaacaagggaaagataattaaagggtgcatgttttgagctacgtatcattgtgggtaactgcagctgagtcctactggaaatcctctgaggaagcctgtagaatgtgcctggaaattatccctctgtagaacagaaagctgacacattaatccactaattcctgtcaccctttgctggagaattatttctagaagcattaactacccccatttttccaggataccttgccagggctgaacaaactctctggcttcagaaaaatcccagaggcagaaaatgaaaagtaatggggaggattgggcttgaggtgaaatattgacagcatccaaaactccacaggaattttctaccaccagcttcagctaaaagctgaagtagtcctaggggcatatggtagaagatgaaattgaaccagtttacaaaagtccctatgcagtcaaagtaattgaggaaataacttaggataatagatggagttctttgattgtatggaagttattgatatcctctgagctattgatttatcatctgtaaatggggatgagattacccactttgtgtggttactgctagaattaaaagtccttattatgtaaggtgcttagcacagggcctggcatgtagtaaggtatagagaacaaaagctactatattattgctattatctattgaaagattagtaatattaataactacctgcattatggataatagactaattcaaattttatgtataatatttttgaatattatattcaagttcactacttaacttgaaccagtaagttcactacttaagaatataatatttcatatgacaagacattgcagttttgtttggaagaacattaaattctggtactttttgaaattagttttatcatagaatggctattgggaaaatcataaatgtaatctaattcccatgcattctttttcctttggttaggatttcgttgaagtttttattagactagaatgatttattttatttgtaaagaaatcaccacagatgtattgttggttttgttttcaaatcttttctgcttttcaacttattcaaacacaagaaacaatctaaatgcattctactctctacaacctctgatgtcaaataagttttctttaattctagcttaaatctttaatgctgcagttttgtttttgcttattttcttctcagtggagaaaaaaggaacagctggttactattgtcaattttctattgtttggaatttattaaatatgcaacacttgtgaatacatagatatcaatacatatttccttccagatatagaactcctattgcttttctttcaagagtgatagaattttatatgggaaagctttagagttcttctagtcccagtatatagtctgattatttaatactagttaaaatattattaattgccatctagaatttcttgtggtaaattgcctgatgtgttctttgctcaactaccaattggactattattatatttcttatgaatatattgcaacgcaacacaaaatatctttgcatattgatgttaactattaaaccactacatgatattttcccccaatttgttatttgtcttttaattcagttgatagtatttttgccttacaggttcataatattttgtcagatatatatatttttctcttatgaatttctttttttggtttcatgcttagagatgccttactcaccatgagcttttatctaagttcacctatattttcttctggtcctttaatatttttatttttaagttggttttctaatccatccagaattaacttaaatgcaggattgcacatttgttcctaataaatttcaagttgtttattacagcatattgctttgatatgttgtaggattttatatcataaatctgttacatatatattcatgctatatatcagtggttctcaatcagaggtgattttgccctctaggaacatttggcaatgtctgcagacattttttattttccaggactaggggagaggctggctactggcttttagtgagcagagagcaaggatgatactaaccatcctacaatgtacaggactgcccccacaacaaagaattgtcaattgtactgagattaagggaccttaagagatgatagatggatggatgcatagttgatagatcaatagataaatgtatagaagatagatattcattgaataccatttttctgccagttacataccaatagtaatattttccagcctatatttttattctttacctatattctattctttaccctgaagggcattttaagagacattgactcctactttatggaaatccagatacattgaattgttggatatccctggtttgagcacataataaatattgaatgagcgttttataaaaatgacaacaataaatcaaataaattttaatgaaccttatttcactacagtaacttatttttatatgttaaaaagtatgctttttaaaatccattgcggagttttgctaggaatcaattttaagcagtatgtttcttctttagtcttctgccacatctgttattctcttgctatgcagcataaatttcatcagaatattaactctgttctctatattatttttatttagttttattaccactgtcaagcttgcagatttccttgtacacacacatctctttaatatgtagagttgcttattcttaccatctatgagaatcattacttttgcataaagactatatccatttttagttacattctgggagttaatattggtatccatggaattatatgtgtcttctgtgtcaaaaatttctattcactctaataacttatcctgaacatattttgtattggtattaacactttattgtttctgatccccttattagaaagatattttcttctgtgtatttgtgagccttttaattcttattttgcttcctgtcatatttgacatcctctacaacagcaatgtccaatggatggaatttatcgtgatgatggaaatgttctgatctgcacagtctaatatagtaggcatggttgagcacttgaaatgtagctagggcaactgaactgaggaactgaattttacatttaatttaatttagttttaattttagtagccacatgtggctagtggctgctgtatcggacagcacaattctatagagtaattccttacccttccatttttagcttaaaatcctcagctttattttaacttaaacctatttttactggttgtgtttgtatgcagttttgtttgttttgtatattgtatgcgtttcttatgtcccagtgattacgttattttttacttcatttcctatgctttccatacagtaataatacatatccttaggcaattgagagtgtgcaaaggtatttctgtaatgtattatctattaatatcaggtgcttgcttttctttacttttttgcaaataaaatgataatgttcattgtaggaaaaatgaaggaagaaaaacagaaaatataaagaagagaataaggcaaagattattactactactaacttcacagacacacacagacatacgcagagggatacacttggttgagtactttctatacatattcttttatttttaaacaccttactgattgtacagctaatacgtatttatcactagaaaaaaaatttaaaaacaggagtaaagtgaaggaaaaaaatcatctgtaatcacaatgcatagattaaccacttttattactttgatttgttttctcacagtgttgtttctaagacctgtgggtagatggtgtgcaggtaggtaggtagacagctggatatgtagaaaggcattttcaaaaattgtattatactatatgcagggtgggacaatagaagtatacacttttcaggtggcaagaaaacaaaattatatgtcactatgagtatgtatcatccacagtggtattagtgaccattctgaacatttgtaactttaatagaaatatatattggttaacatttatccactgggtttgtctatttattaactgtatcttgctttttatatcatgaacatttttctctagtataaaataaaattcacaaatgtgattttaatggctacgtcataatccattcgttgtctctatatcattaactagtttcctattattggacagttaggatgcttctctttttttactactataaatagcattacactctacatttagtgcctaaaatttttcatctctgattttttcatttctgattattttatctctgattatttcattagtatacatttttagaagtgaaatcactggcccaaatgaaatgaatggatatgagatccttggtatatattgtcaatccaaatcaccttccagaaagttctttgttgcttatagaagaaaatattcttgttccatttttatggtttaatcatttttatgcagctattttttttttttttttttgagatggagttttgctctcttacccaggctggagtgcaatggcatgatcttggctcactgcaacctccgcctcccaggttcaagcaattcttctgcctcagcctcctgagtagctgggactacaggcgcgtgccaccatgcctggctaattttttttgtatttttagtagggacaggtttcaccgtgttggtcaggctggtctcgaaatcctgacctcaactgatccaccggcctcggcctcccaaagtgctaggattacaggtgtgaaccactgcacctggctgcagcttttcttcgaacttttaaacttctgtttggttttacgactcaggattgttttttaataaacgtgcctttcaagggtttagcaaagtaatcatattgttataaatacccaaccaacataactttattttttgctagcaaaggttttcagatataagatttttcattgtataaattgtttctttttagggtgaacaaggagaaaaaggagatccagctctggctggccttaatggagaaaatgtaagcctaactcttttttctgatactctgtttacattttaccactaagatatgctatttaatgctattaagatttgcctatttttggcagagccagccagccatgatccaacaaaattaagaatcatggtgttctttcacatggctcagtagaggcccagtgtttttagtttcatttcattggctttatgtattttctacctgtgcttagccttaacaggcctttctccttgacgtttcttgcttgcaaattttctagtcttttttttctgtcttttttcatcttacatatcttctgccatggcttgtgctcttatcagtggttcacttttcatctcagtccaaatctccatctagtctatagatggcgtctgtattggtaggctttcagtgatgggaagaaagggcgaagtgaagggaaactaactccgtattgctcccctccatggcaccagttccacagcctcagggataacattgcctgtgatatcctaggaccccagtcatcttctccccttcccctcaggatggttatcctcccagaattgcactccagattttaggataaaatttgaaggatggcccaaatgtgggtttcactctgaaatgtaattttatttacatttactcaccatttactatagatttgttatctttactggtaggggaagtgtccaaaatgagaattagtttttccctcggcttccttttctcacttacataaatatgttttggaaaggacctgaagggccacatgacttataaaagaataaggaaaaactgtgagactatatctagctccctaatgccctagatgtgttcagaaacccattttgtatgcaggagatcattacagcggaagagaggctgaagaccaatctttccggcctgtggagaaagtcgtgtgtgtgtgtgtgtgtgtgtgtgtgtgtgtgggtgtgtgggtgtgtgtgtgtggagtctcccaaaaaagaaagaccctagtagtaatagtagttaatgtttctatgtatgttaactaaaataatagttgtttcaccatcattcttatttctctccctttgaagtgatttttctacaccagagaataggcactagccccagtggcttgtagctatgggagtctctgcatcttctttaccacctgtaatacatcaggacactgaatgtcacacatgtttaaatagagtaactgactcacctcttactcctgtcattggaggcacgtggtgaagtgggatgagttctggagtagaaagccagggtccagtttgtcttccagttctgtcacagaagagcagatcacttctcagagtctgtaaaagtgatggacttgggatagattcttttttttttttttttgagacggagtcttgctctttcccccaggctggagtgcagtggcagtggcatgatctcggctcactgcaacctccgcctcctgggttcacgccattctcctgcctcagccttccgagtagctgggactacaggtgcccgccactaggcctagctaattttttgtatttttagtagagacggggtttcaccgtgttagccaggatggtctcgatctcctgacctcgtgatccgcccgcgtcggcctcccaaagtgctgggattacaggcgtgagccaccgtgcccggcagacttgggatagattctaaagcccctatcgctattatgtgctatgattttatgcaaagagttattaagattataaacttgaaaagtctgacgaggcctgaagcattcattcaggttcattgagtgcctgctacatgtaaggcacagtgagaaaaacaaaacaggaagagatgaagccagagcataggaagtcctggatgtgaggatgcttgtccttcctcctcaggacaaaggggagatgtggcccacactttgtttaaatgaaaattccttttacagtggattctgaaatggatagaatttgggcctttgcctgtgttttctgttctttctattacactctccgtgaaagcaaagaccatgtgttggaatcctagtacttagcacatgtttggggtaagttccaaataactatttgctgaatgttagtttgaaaaactgagcggttattaatattatgacagagtaaaatataagtaattagagtctaagctagaataacagatgtggaagggaagatacagagaatgatgctaaagaggtaaaatacatatgatttggcacttgattggagttgaaaactcaaaaatagcccaacatgttgaccgttctgtgtgagaaggatactaacttgtgagaaatgtaggagtgttcaaacagattaattacagtgttccaaaaaataaccaaactacaagtatgtgggctctctgagatagaggagcaaaacagagtgtattacaagtgcataaaagtaatattggaattgaaatagaaagaggagtttttgaaatatttgaataaaactagaaagatatttgagaggttggaacctgaaatatattcacattaatttcaagatttgaaaatttttcttacattgtctgaaagtaaggtttttgggctttttaattaatcaactgatacatgcatatatttgagggcctactatattcccaaactctctgtcagccactgtgtgagttccaaatctgagtaacactaacttactgagagatcccaaaggcctagtgagcagtgtgaatgtctatccctttgaggaatcttgaaagagtccttcacatgccccaataacaggaggtcattcctttagcaccgttattgtctgatgtagctcattaagtacaaccataaagcatgacaaagcacattaacttttctcacttggttacttagttaataagtagatgatgttattttttccccttaattttgccaaagatattcaggagttatgactaaggagaaataacaaaaagtagtaagagttctcctctttcccctctatcactagtagtaaagaatcagctgcttggttattacactgttggagatggggggagtgttaatattgtgttatagttcataaactattttcacaaggaatttgaaatttgaccctcacccagcttaattggctagtagagtggggaatgatagtattcgtattttcagaagcaagaaattaaaggcttcagaaattaagcaactttcttttttaaaatactaaaattggcctttaactctaaatatttggctgaaaagtctgatcttcccagtaaatcctgccacacatcattgcttatttttcagtgctaaaaaaactgagtctgcaaactaaagtaattcagcgtttatgacagttcactctgactttcaataagcccaggtatacattcttaggaattgaaaggtattataatggctattttgatttgaattaaagtcaagccaatgatggaaatcataacttcagaaatattgtcttagaatgtatggtaaataaactcagtgagccaggtgactccagctactttctaagtcagagtatattggaatgctttaatatttctactaaatgaattccacagcctttttaatagtctttattgctgtgtattatatatgtatcttagtgtcaatgtatcttataataacttattttgtgccagctttctcacaaaatgggccagctcactttggaaagtgtaaactttaatttaaagggtagtatgtagcaattcagtctttctcaatgtggcactcttggcattttggcaagacagttctttttcaagtcagactgtcttgcaagagcagaatgtttagcatccttgaagctcaccaacctaatctaaatgccagtagcagcccctagtcattgggacaagaaaaaatgtgctgatatttttctaagtgtatcttaactgtgtgtgtgtgtgtgtgtgtttgtatgtgtgtgcatgcctaaacttttgtttgatgtctgtggtattactaaacaaatgcatgctcatatgtccattctagtttaaataatgcatacaaaacatatattaaaattttcaaaaatttgaattgctagaaaatttaaccttgaaaatatatgaccttgtctttacacacaatctagtgtataattaaataattttgattgtggcctaatacaagatatatttaacaaaggtatcttagaatagacttgagagagaataatataaagttgtaattgtgatctttaaagccagactatctgggttcacatcccagctctgccactaactagctgatgtactacttggtaaattacttagcctctctgtgcctcagtttctttatttgcaccatggaatgataatttcaatatcctctctgtgcctcagtttccttatttgcaccacggaatgataatttcaatagtacttactgtaggggaaaagataattttcccttcccctctgaggggttcagtcagctgaaatgaactgacaatggacagattaacaggagaaaaggcatacaaatatattaacgtgcatacagtgggagccataaaaaatacgagactcaaagaaaggccagatggttgaagcttaaatagaaccctctttataggaaagaaggagatggggaaatgtaggcaattttgagaggtagtaaactcttttttgaattgaatgggaccaagagctaacaatagcttgtggacaagttacagaaaggtgaaggctggacctccactgtgaacaaaagttgtcttgttttgcagataaagactcccagataatctctcagagctgccctcagaagaatagaccaagagtctgtctgggcatcgtgacaacttttagtttattctcttctccagagattaattttcctggttattctgttagattcctaggaagggggttttaagacaattgctttttttggaagaagatttctcagtctgataaagaaacttccagagagagctcctccctgtacttgaggaggggttggaggaaaaacaagagaaggttagaaagttcttggatctgaggcagcttctaaggcttttcaattccttttaattcaaaagtactcagcatgccaaagcaccacactttggggttatcactctctgtaccccaaaattacctcatggatttttttgtgaagattaaagggactatcatacagaaagcctttagaacagtgtccaacatagggcaagaactatataaacattcactattattagaaaccaagttaaataaaacacatttagctctaataggtacatgtttttatttatttgtttctgtggggttatacaatcttagaaaagtagacttaattgttgagttgtctctttttctgaatctatattatggtcttttaagtatcccttattagaattacagcatctgatgtttctaaaataatcatgttaatctccttataccaatgcaatctgtactagaggatacaaaaatattgaaatcacaaaaccagagataacagctggcaacagctgttgacattgctagggaataacattaagtcattgaaagcttgtgaaaagaattaattgatgggttaaaaatttttaacaaataatatttttatattatcttctgaattttaaagatatgatatcccatgagtagtactaggtactccaacaaaaattgattttatagtctacccgcttttataattctagttataatactgctcttcagcttttgtcttgcctttagataacggtttctgcctccacattacatgtagaatcaactactgtgcttttgggaatctttatgtacatgaatttgattgaaaaccttcataacagataccgatcttactcaatatttaattcagagtctattccatttggctctttatgcctatggtgagtgctgtgtcctttctccctagcactcaataaccattgataggagcaccagtgtgacacaaggagaaaaaccgcatttgagaaaagcattactgatgtgtttctcagaggctattacaatgccatggccttaacaacattgtactttgtcacaggaagacgtgagttacatgggcctactttaatggtcataaaagtagaagcttgacaaatgcagtacttctcaattgcattttatcctatgtgagttaaagcacagttgttacatatccatcaaactggtataaagctgaacaagaaagaactatcagttatcccttaaacttgaacttgaaaagtaaaaacaacatttattaagtgcctaccgtatgctaaatgtctctacaacatatgattctcagaacaacccttcaagaaaactattacttattatacctattttataggaaagcttacccaacttacccatgattatacataaaaggccattcgtcttctgactctgctgaaatccacatctgtgaagtcttggacaccccagtagaattaggcatctgtgggaaatgcttttgtcatacctgctatatacttcaatgataatactcaatattcacatcagcttgtaattggctacatcatcccttcccctcctccctgcccatagttgactgaaccagggagagttacctgattcaactgccaatacattgcttccctagaaattacaactgggattaatttgttggaattaatctttaaaacttttaatgtattattttatacctacaaaataatatatataacatatatgatggttataaatcatagttataatgaggaccccagtgtacccagaactcaatgtgagaactaagacgtcatcctccacttggaatctccctgtgtggttcactatatactgtcctccactccagagttaaccatttttctaaatgctgtacctaatgtttccttccatgcttaaaaattatgtttcacacttacacatttataaggagtatataatttagtcttacatgtttgcagacgttcaataatatttgttgagtaaatggatactcaaggtttttatcagtcatttctttttttgtgtttgtcttttctctgcatagttttacacaagcaaaaagagaaaacctttttttaataaatttctctgctcagtgaatgggataacttcctagccagttacttaagtcaaatgcaactcagcctggagactttccttcttcttctccacttctggcatatctgccagtcttgcttccagcatgtgccaactctgaccacttctcatcatctccactggcacaagcctgtcccagccatcctgctctctttcctggaaaagctgtcatagccccttttatgctcccactcttgctgcccataatttgtgttccacgttgctgccaaagtggtttgtggggatttttgtaaacatattcacatcatgtcattttcctgcttaaaacacttaagtggcttcccattgcatgtagaacaaaacccatcttcctcatcatggcctgcaattacttatgtaccatgacccctggcaaaccttgacttaaccccctactccttacctgtgtgctcatgacactccttttatcttagtgacctctgtgcttctttttccctctgcccccacacagatcattgcgtggctggatcctttttttttttatttgagcaaattcatgaggtacatgagaatttttttacacatgtataatacatagtgatcaaatcagggtgtttaggttgtccattttccaagtgcaatacattttttaaaagtatgcttatcctactctgctatcaaacattgaatttattccttctaccttactgtatgcttgtatctttttatccacttcttttcatcctcccttgccccctcactcaccctttccagtctttgttatctatttttacactttctacctccatgtgttcaaattttttttgctcccacatgtaagaaagaacatggaatatttgtctttttgtgcctggcttacttcacttaatataatgactttcagttccatccatgttgctgcaaatgacaggattttgttttcttatggcttaatagtactccgttgtgtatatataacaccttttctttatccattcatctgttgatggacacagaatgattccatatctttgctaggatccttctgaaacaacaaatgtcaccaccacacaaggaccatttctgacaccccccttgaagtagcaactctctcctctttcacttttatcacattcagcctgttgacctgtttattgtcagccactcacctcttattacatgagttccttgaggacgggaaccttcacctagttaaagaaaaaaatcgttgacacttgtttttaaaaagcgataaggaagacattttattccagactattgcaataggggaattgcaataagggagacagatcaggttcaactctaactacaacaaggacaggtggggatttatagccaatgagtagagggagggatgtcactggatagaaaattactaagaggagacatcaagggtagggtgattcttaccaaactgatctaagaagattcttgctgaagacaggccaaagacttagacatcaagttagaggatgaagaacttgatcttctcaaaagtaaggaatggagaagagattttaagggtgagagattctctctaaacatacttagcaagattcttgctataactgagctgggaagaccaaagacaggatgggggccatggtccaggtctagctgagaagagggctcagagaaccatgactaaaagtttggtgatggagagaatcttcattaatttcttgttcttttctgtatctctaaagtcgtactaatcaatagaaatataataagagctacaaattcaagatgaaggcaaatatattatttttttctagtaaccaaattaagcaaaataaaagggaacaggagaaaatacttttaataatatgttttatttaatgcaatatatccaactgttatcatttaagcatataataatttaaaaattattagtgagatattttacatttttttcttatactaaatattgtaaatctaacagtgttttatattcataatacacctcaattcagagtagtcacatttcaagagttcgaaagctacatgtggctgtggctaccagtacaggtctaaaggccagaagcaacttcacacaaggtatataataaatgtttattgaataaataagtgaaagaacaaatgaattaataataaatctattcacagaaatggcaaatttcttccttcaagtgtttacaatattctgtttccaagttctactctggaaacatgtataaatagagtatgcgttgcttgatttgggaagaaatggatattgtaaataataagacaatactgtatcacatctcaaatatcatttaatttttcactcatcctttttctataaatattccaaggtaatgatggaaaaaataataactatgagttttatacgtgaaggcatttatgcaactagaagttttttttgccaattaggtattgttttcatccattaaaaatgtttttcttaaagtataatactacaattttcacacactgtctgcaacaggattattttaagtatctaattttcttttgtttctttcacttcatcactggtgtctatgttgagtacaggtgatggcatttggcattatttattcactacaaaatgtcagggcagtaatagccgggtctttcagctaggaacagtaagacacttagacttactgtgcattgtgtggcttcagaatacttctttcttctattattgttcttccttcatccagtgtgttaaactaaggaaaaaagaagttttttttttctatttaccacgtagtcaggatgtgtctatctaactttctacgtacactgtgaattcatgcagctgtagagctgatctcctctggtacaatctattgtggaagtctcaaaagctgtcattgcttagtcagatcaactaaatacccattaaaacatccaacagtccagaggacttatgaaaatatttatctgttattctgtatatgtcatatatagtttcatttgacatctttataaatccaagtaaaaaggaattagagaactaaaatatactttaaaacaggcaagagattacattttagctccagttgtatgatagcaaaagaatacatctttcattccttttcccctcacaattagatttcttgatagagacataaaaatgtttttgattttactcttgaatttttttggcaagcttaacaaaggccaaatcaatgctaaatcagaggtatttacaacatccacaaatttaatccaaagtggatacttaaaacctcatatagatctaaatgatattctcccagatggtgaattaatgtaattttagcaggaagcaaagttgcacaaatatgcagtattgaggactcgcgctgatttaatgtatctgtgcccaccacggcacagatgttgcttatcattttagtgccagttgtctctatttctctctatactacaaaaggaagaatgagatttggaggttcagtaaattatgatttattttgttactaatgacttgttagaaattaaagctttctgtgaactgtgtattggttatattctttctacagggtttgaaaggtgacttgggtcctcatggtccacctggcccaaaaggagaaaaggtattgtgtttacccagccaagcccaacctttctttaagaaaactctgacaacctatgcagtgacttctcattcatactgtttatctcctaaaagcattctaaaattaaccaaaagctgttaccttaatagcatctgaataagaacagcctttttgttcatttaattagtttgaaaagactaaatgcacaattgctagttgacattagcttgtatttataagatttcccttttctcacccttgcttaacagcatgaggtattcaatcatcaaattagcaagtgtgacctgtattggaaaactttgccaataacactgagctgctgccataatggtgaggcaagtggcttttggaaagaagctagttttgtatctcagtcttaatttaactattccattttctgccactttttctcataaaataagttatttcataatgacatgttggcaatgatcttgaaaaggaaattaagaaataggaaaaagcaagggttgttttgaataaagtagttgggtgatcccagtttgatgaaaattgtatgtatatgtgttttgcaatgcattttgttctccatttttagcacatttagaaatccttgtctatcttcaatatttatctctgtgttaaaggtgatcctgcaaatgagtccccagtgactgatttaagccacttcagtgttcccttagcaactgttggctattttaattcaattgttccaaaaaacaatgaatacacaatgctaagttttaacttctgaggtggctatattggttgagaaaagagaaagtcctaaagatactcaatgtgagactacagcatcctggtaccccacgctatacagtacagggcttccataatgtgcagctaaataagaaccgtggaaaggatgcgtggtctttaatgtttgagagttcttaagaaataaataaagttcctgggaaagtaaacatgaaggtgacatagaaattggaaaatagtgaacttttagatgaaccattttttaaagatgttgaatagtttgttgatatatccacctggaaatttgtattcacatagatcagcaaagcaattttagcgttcagaaatacataaatataggcaaagcctcttacagttgatggcaaatgcaatgccaattcagcagagctttagaagaggccatgggactgcttcttgcagctgggaagcatgaaatggggagatccacttattatttctgctgatcttcatactaactttgtcagacaaattatctatcgccgtgacacttcccagctgcttcattggcaagtaaacatacttgaaaatatattatttctaattttggattagtagacaaaagaatagaaaattagattattttcgctttcaaaacaagtcctgctgttgcaaaaagcatagagtatacaaggtgatttttatatcatgaaagctaaaagggacatgatatattttctttatgcagagacttttatcaggatgaagttctatttttctattcttcaagatttatctctatatattgcttctatccacctagaaatttataaataatgtgcaaaaagggactagtggtaattgtagcttttctttaatctattttagggagatacaggacccccaggaccaccagccttacctgtaagtattcttgaaatcaaaattcaaaattgaaatccattattctgtttattatccatattacatcatgactaaaccagaatttaagtcacagagttaagaattgaaggtgacttcgagtacatgtagtcaaacctccacattttaaagatggggcatctgcccacaacagtgaaatatctgacccaaggtcatacaggtagttacaattaaagtctggaatcagtacctaccctgagcaatttcctctatcctccatatggctcataattttgtctcctaaatgtttgattatgcactcttaacatcaggtttaatgtaaatggaatcagatacagtcctacttgctttaaaaactgtaaaaggacaaaacaaactctaatcacccagtgaataaaaacagctacctatttaaactggtaattacattctcccaacactttccaaaatcattgttattttcctctatgatttgattctaaaatttgcagatgataaaattgcaatattttagtgacagatttatgagaaaagtttatagtgtgcacataatgagattgttctcaatcaaatggtacatcatgtattaagcactttataataaatatatgattctcttatattcagatacaatttactattacagacttttttcataggtgattaaagattcttatttaacttaaataagactctaagcctaatggaaaagaggacagttttgttttgttttttttaaaaaagatcttctatagcctgaagtcttttgaattttatgttgatgttacctagtgagataaattaagcatttaaatcagtagtattcgaagacctattctgattatagaaggtcagatttttaaaagtattctagtaatctgaatggagcccttcccataggtagaacataggaatctcaaaaactgtgtgattttgataatatttatatttatctttgtacttaaaaatcccattatgaaaaatacattaataatgtcttacacaaataattgttacaactcccacataaacaaatgttttttgatatgtggaaaacctaaggaactaaatagataacttacttggggataactcattcaatttgcagtggaagtttatgctttaagcttttattttaagcatgaaaagaaagactatttttttgagaggaggttttaagtgcatattattcagttttttatactttgtagaattttattttattttattttttgagacagagtcttgctctgtcacccaggctggagtacagtggcacgatctcggctcactgcaacctccgcctcccgggttcaagcgattctcctgcctcagcctcctgagtagctgggactacaggcacctgccaccatgcccggctaatttttgtatgtttagtagagacaggttttcaccatattgatcaggctggtctggaactcctgacctcaggtgatccgcccacttcggcctcccaaagtgctgggattacaggcttgagccactgtgcccagccttacactttgtagaattaaaaaaaaaaaattatttagcagtgatttagttaaacctgctctttttacttaggacagatgcctgtttctctttaactaagttacatgcagtcatttagttaaacctgctcattttatgtaagacacatgcctgtttttcttcaactaagttatatattcaactactcagttatctgatttcattgtcattttcaactcatgttggaagactgatatgcaatctacatatattatttcgcctgaaatacaattttggcttctcaatcagaaaattgtattggattacatatattttgtggatgtttaatagcagctagcttctttctgccaaggaacaccttgaagatacctctctgcaccaattcatctgtcaagcacttagagattacaagctaatttcatacttgtctaaaaatacgacaaggaaaaaacactatgaaatgaaatgttttatttcataaagtaaaatattcatattattggggtattactattttgtatgcttgacattactttctttattaatataaattatcaactcttccctacaaaatagggataaactaaaatgaataccaacttacaatacactaaatatttaattgatcttataatacaggttggtacattattagttgaaataatttataatagtctttgaggaagcccaaatgactaactgcgttatatttggattaaatgaggcagtgatatattggagtcaataaacagagttcatccataattgttctcaaaactagctccacgctaaaatctactgaagagttaaaaaacttaaccaatattggggctccacccccagaaattccaattcaatcaacctgatgtgggaccagtatattttaaaagctccccgagtggatctaaatatgcagcaagagttgagaaccattatttatgggaactagaatggaaaaagctttcttcctactcaaaaaaattatatcagattgttgaagaagtccaacttccatttgaaatccaacttaatacatagcgataaagaactatctctttccgttagggaggcatactagtaaaatgaagttaagattgaaccctgcttcattaaatggagagaattagggctaggaagatacctttaattacaaccttcatctaaatgtccatgtactcctgtggcttgggtgcctttcatgcttcttaaaatttaatgtatgtaggaacactcagggtcttgttcaaatgcatatttttattcctaagtctgaggtgagatctgagcttctacatttctagcaagccccaagggagtcagatactactggttgttgcactacactggtcacaaaggcttagcaccctcttcccagttagctgccttttcccatagatcaatggttctctgtcgcatcctggccaacatggtgaaaccctgtctctactaaaaattagctgggcatggtggtgtgtgcctgtagtctcagctacttgggaggctgagtcaggggaattgctcgaacccgggaggcggttgcagtgagccgagatcgcgccactgcactccagcccagctggagacagagcaagactccgtctgaaaaaaaaaaaaagattaatggttctctatcttgactgcacattggaattacccaaggtgctttaaaaattctaattcccagactgtaccacataccaataaagccagaatctccagggagggactcaggcaacagttgtttgagatttttcccaagcagttctaatgtgcaggcacgctcgagaactaaggctctgaaagcatgtctaatacttttctttacagctttctcttacagatcttgagcaaacattttggaattactcattacactagtatttatatcaaaaacacccaacctgattactttcaggagcttccaggagaggccagccttcctagtcatacctacaatttgcttcctgattacttcattatagaggatagatgaacgtccatctccacatttacaagctactagcaagtccaacagtaatccttcttgagaaggacaacaagcattgacaacttcaggacacagaattccagaaattctcaaagcacacacagctgaactgcccagaataactaagggcgaagagctgaacactttttccccctctaagccatacattctatatttgctttacttttattcatattttgtttaataagaaattaagagaaatagtaattgagcacactgtaatactgagtttactgatgcaggggcaatcctttatgatgtttttggggaagtattgttttttttttttttcttttgagacagggtctcactctgttgcccaggctgaagtgcagtagccccatcacagctcactgcagccttgacctcatgggcttacgtgatccacccacttcagcctcccaagtagcagggactacagacggttggcactatgcccagctaattttttttttttttttaacaaagacaaagtcttgctatgttgcctaggctggtcttaaactcctgagctcaagtgatcctcctcccttggcctcccaaagtgttggaattataggcaggaaccactgagtccagctgggattatgtttattgctgttatttttgtgtccctgtggattcttgtgcttttggtacttaaattttttttaatcacatagaaccagttcatcaaaaaaaatctgatatgtaaaaccatctatttcattaaatgttacttttgttgcttatttatactttcttttataactcgttgagtctgtatataattgggtctcagtggaagagagagaataaagaagtgagggtgaccaagtttaaaaaggagtaggaaaggtaaaattgaggaaatggcgtgaaacacagactggagtcctagaaacagtttgatttgctaggttcagctacaatagcttttaccctttatttcacctctcccttcctatcacctgaaagtattcttactgccagtgaccagtgcttcctcactctctaatatataagaaacctattaataagaaagccaaccaaaatggtgctgcagtttcaaatgcagtttgcaatatacccctttattatttcaggaaatgggaccccattcaaaattccacagttgaatccctttgataacgtttgaatccttctatagattcatgttcacgggtcatatggaaaatactccaatgtgactgccttggagaaaagaaaaggaaaaaaaataataagagaaatctgaggcctgtaaaaatgtcatggagattaaagtgatatttatggcattaattgtcacttacatcctttaacctttaaatattctgtcaatctacttgacttgataaaaatagaattatactttttgatatgacgttaataaacttgcaaatcttattttgtagactttccagattattctaacaataaaagatattgaaattcaagaacaaatttgtgaatctgtaagtggaacatctggaaactattttgtaaaacagtgtccaagaggcttcccttaatactttttttaaacaaaatttcatatagagatacggaaaaaaagaaatgaaacactttcagcccagaaggtgggaatgtggttgaattacacacacaaaaaagaaagactaaaaatccatggttgccaccataaacccaccttcatgtatctcttgctaggaatattttcagcaaatacagctagttgaaaataaaaaatttaatgaaatatctgatttcttttcagccactttttggaagataccaaattcactaattagtttggtactaacaactattttgttaacacaataagccattatagaaacttataataattttaaagttctaaagaaataaatatgagattcttcaacttgatttaaattaattaactgattattccacccttatcctttttatatttcaaactgataaccattttaaaaatagcacatcttgttagattttaagtaataataatataaataataaatggtagacatttattcagtgctatgtattgtttaaaccaaaccttaaacaaccctgtgaggtataaaatgattattactacatcgtacataagggaactgaggatgggaatatctaagtaaattgtccaaggttcacagatgttacataacagagctaatattcaactgcccatttggctgactcttaaaacctaagctattaaattctgcaagcattatttaaatctagtttaaaaaattataaaaaaaacagaaatgttctaaactattgcaaaaattaaaatttttaaatcaggtcaggcatggtggctcatacctctaatcccagcactttgggaggccaaggcaggcagatcacttgaggtgaggagtttgagaccagcctggtcaacatggcaaaacctcatctctactacaaataaaaaaataaaagtaaaaaaaaaatagccggatttggtgatggatgcctgtaatcccagctactcagggaggctaagtgggagaattgcctaaacccaggaggaggttgcagtgagctgagattgcaccgctgcactccagcctaggtgacatagcaagactctgtctcaaataaaataaaataaaataaaattttatcttgaagccaaaattcagaaaaattcaagtgcctagcagagatggggtggaaatgtaaatgtgcgatgcagcccagtgtaagataatagagtgtgcttggggttagggaccaggatagctatgtttatctcaaagtatcaaattcgaattaaaaactacttagagattgcctaatgcagaatataggcatactttggagatattacaggttcggttccgtaccactgcaataaagcaagtcaccaattttttttgcttttccaatgtatataaaagttatgtttatattataccatgtcctataaaatgtgcaatttatattatgcaaaaacaattttacacattttaattaaaaaatactttattgctaaaaaatgctaatgatcatctgagccttcagtgagttgtaatctttttgctgtggagggtcttgcctccatattgatggctgctatctgatcagggtggtggttattgaaggttggggtggctgtggtaatttcctaaaataagacaaaaatgaagtttgccaccttaattgacttttcctttcatgaaagatttctctgtagcatgtgatgctgtttagtagcattttacccacagaacttcttttgaaattggagtcaatcctctcaaatgctgctgttactttatcaactaaatatatataatatttcaaatcttccttgtcatttcaacaatgtttgcagcattttcaccaggagtagatttcatctcagaaaaacattttctttgttcacccataagaagcaactcctcacttattcaagcttaccatgagagtgcagcaattcagccacatcttcaggcttcacttctaattctagttctcttgctatttctaccacatctgcagttacttcctccaattacatcttaaacccctcagagtcatccgtggggtttggaatcaacctcttccaaattcctgttaatgttgagattttgacctcctctgtgaatcacaaatgcctttaatggcatgtagaatgttgtttttcaatttattttgcccaggttcatcagaggaagcactatctatgcagctatagccttacaaaatgtatttcttcttcttttttttttttttttgagaaggagtctcgctctgtcgcccagactggagtgaagtggcgcgatctcggctcactgcaagctccgcctctcgggttcacgccattctcctgcctcagcctctggagtagctgggactacaggcgcccaccactatgcctggctaatttttttgtacttttagtagagacagggtttcaccatgttagccaggatggtctcgatctcctgacctcgtgatctgcccgtctcggcctcccaaagtgctgggattacaggcgtgagccaccgcgcccggccacaaaatgtatttcttaaataataagtcttgaaagtcaaaattactccttcacccatgggctgaagaatggatattgtgttagcaggcatgaaaacgacattcgtctccttgtacatcaccatcagagcccttgggttaccagatgcgttgtcaatgagcaggaatattttgaaagaaatatttttttctaagcagtggtatcaacagtgggcttcttcagtaaaccatgctataagcagatgtgctgtcatccaggctttgtcattccgcttatagagcacaggcagggtaaatgtagcataactcttaagggccctaggattttcagaatgaggattggctttaccttaaagtcacaaactgtattatcccctaactagagagttagtctttcctgtgaagctttgaagtcaggcattgacttttcctctccagctatgaaagtcttagatggcatcttaactgctttgttgacattgaaaactcgttgcgtggtgtggttaccttcattgaagatcttggataacttgctgcagcttctagatcagcacttaatgcttcactttgtacttttatattctggagacggcttctttccttaaacatcatgaaccaacttctgctagcttcaaacttttcttctgcagcttcctcacctctctcagccttcacagaattaagaggcaagggcttgctctggattaggctttgatttaagggaatgttgtggtttaagggaatttgtggctatttgggtcttttatccagatctttaagtctttcttcatatcagcaatatggctgttttgctttcttatcatttgtgtattcactatagtagcacatttaatttccttcaagaagtttttctttgcattcacaagttggttgtttgtctggagggacctggcttttgcattcacaactcggctgtttggctggagggacctagcttttggtgtatctcagctttcagtacactttcctcactaagtttaatcatttttagcttttaattgaaaatgagagatgcgcaactcttcctttcattcgaacacttgaggccattgtatggttattaattgacctaatttcaatattgttgttccttaggaaatagggttgcccaagtagagggagagagacagagaaatggctagtcagtggagcagtcagaacatacattctctctctcttccctttctgaaatgccagtggcagatatgttagatttttgataatgtccctcttgtccataaaactctgttcatttttttcccatctaattccatcttcttgggaatggatcatttccaataagcccttatcaatcttactcttgctttgttaatttccattctgctgttaagactatcatgtgaattttttagtatagatactatatttttaagctagtgaagtttattttatattaaatagtgtctatttctctgctgttatttcctatcttttcattcattatgagcatgttttccttcctgtccttgggaatacttttaatagctactttaaaatctttccaggcacggtggctcacacctgtaatcccagcactttaggaggccgaggtgggcggatcacctgaggttgggagtttgagaccagcctgaccaaaatggagaaatgccatctcaactaaaaatagaaaaattagccaggcatggtggtgcatgcctgtaaccctagctacttgggaggctgaggcaggagaatcacttgaaactgggaggtggaggttgtggtgagccaaaacataccatggcactccagcctgggcaacaagagcgagactctgtctcaaaaaaaaaaaaaaaaaaaaaaactttctccgatcattctgtcatctgagtaatatcaagtagttctttgttgattgtcttttctccttagaatgggttatgttttggtgcttacttgtatggcaagtaattttttattgtattttggatactatgaatggtaagttacaggaactctgaattccattttttctgaagagctttaatatatttttaaggcaggcagttaaattggcttgactcgcatagcaaactctgtttctcctacagctggcaacagctgaaatccgttttgttcttttaagctaagctgagctacttgcagtttgcactgtgtatgtttggttaggagtcagccagagatttggggagagcttatacgcagaattttggacttccttacttatttcaggatttgacaaaccaaccccactttactttacaggaattgcatttgccctaaactctgtcctcagatttttcaatccagcaagtctgtaggctttctatttagctaacccatgacccagacttgagcctgtcctcagactaaacatcttaaaaacagaaaactgactccatgctgtttaatttttccaaatgttgactcccctccagtatctgcctgcttttgatgagtttccagtgtcttcaggtagttgttctacatgttgttcagtatttatagttgctatctgtgagcatgttgatttaatataactactgggccatcctggaagcccatttttgtaatacaatgctgagtaacttataatttacttagatatcttgctcctgtaaacataagtgagttagccttcacatttctttacttattctattgaccttgccttcaaaaaatatctagaatctgaccaattctcacacctctgctattactacttggtcctagttaccattataaatctcttgattttttcagtagccaattaatggtctccctccttctccccttgctcttcttgcgtgatttacacaagaagccagaatgttccttgtcactcttcttttcggaatctccagtgtttccccaggtaattaaataaaacccaaattccatacaatggcctacaaagtcttacaggattcaactctcattgcatttctgacttcatctcattttcttctctttctttctgattttactccacaacaaagtaatttttccagaaaattatccaatattcaatttttttttaatgcagagtgctggccaattagaataaatggattgttctgattcagtgcactggtgctgtttgtattttcaggcttacagtgaagaatgaatgactattaagttttaattcctgtgatttgtctaatgattatgatacaaagtttaaattaaaatgtctttaatctatagttgtagattttaccatgtcttgccttattcattttttcatttctcagcaacttgttaaactcatagatggtaaaatttagcattctaatcataaaaatgtgaaataacttgctataaatttgagacttatggtttcaacagcacaaatgaagccaaatacagtcaaataatgcagtgattcagctgaaattctctaagcaactgggttattaacaacaaagaaaaattcccttataaatatgtttttcatatatatgtaccaactttttgaaattccacgttttaaaaatatcaccaaatcacattttttcaaaaggtatttgggttctaccacatctggaatggccatattgctaatatcattgtcacgtattgagttgcagtaatgatggattagaaaaggcacttttgaataacctgttaaagaataaaaattccttttctaaattatttaaaataaatatgttaacaaaactatattcagaatcagcattttttaagatactgtattctgattgtgagaaaactaaatacttaatgtcaagatgacacttaaccagtgagttactgataaacttaaattatctcttctgttgatatttgtaatttacaaggcagatatacgtgagctaaaaccaatgctgaataagaaaaatgtgtttatcataataagtatacacatttatttgatcaaatataatgtatccaaggtcataatgaaaatctgataaattattctgaaatatgaagatgttgacataaaaatcctctattaaaggtaaatatttcatggtttaatcatgttatttgaaaaattgcattttatattagcttttcctctcgtgttgaaatattagttgtaaatcattacattcaaatattcaagtacgataagcacaaattctttggttatatgtcatctgttgttaaaaccttaattttatataaatgtagtgtgtctttatatgtaacttcacaaattgtgtatgttctataaccttcctattacatactattgccagattctcctcaattaaataatataatcctgtttttacagtaaagttttactgaaatacattactaaggcttcagaagcaagacagggactatgagtgaaatgagacagttggctaacatctctatctccttttctcttccagtctttgcatgtcatgtcagaggagagacaggtgaaggaaggtagaacagtgctatttcatgtaatatatccactaattttagttcctaggaaaatggctgtgttgctctggccatgtctctttgggaagttattaaatactcatccagatggcaccaaatgtttatgcagaagccaaaggttaagtctgtcaacagcagaagtgccttagacatgcttactaaatgatacttaaataccagttccttggagcccacataaatccagcttcagtgagaaattacgcacagagagggtgcatagcttttactctaagaaaactaccttaaataccataagcaacggagagaaaatctcagctggtcatttataaatcaaatgacattcaattagcagatgcccctaatgcacaagagatcatatagtgttcacataagggaatttttgaaataattatttttctaagttggtatgtacaagaaacaaaaataactgctcagtaagtgatatggtccctttcctcccttcctcttttacccactcatttagttgaatgcttactgtgtgccagatactgtgttaagccctgcagacacagtaacaaacaacaatcattgtcgttgccttcagaaaacctacgtggtttaagaaaaagcaaccaattggttaaagttgatcatttttaaaatgatcgtttgtgaattgtgtataaaaagtttacaagtatttgtacaactgtagttgttcatattatacacagacatctagttatttcagagaaaattattttttaccagaattcttatgttgtaatttaaagttatttacttttggtttgttaaaatcagttaattggaattaatataattctaatcctttttagagaccaatcgttttttagttccatttaatatatcaatataaggcattaccacaaagatttttaaatgcttagaatagaattgaattaaactaattttaatgtagatttatgactgaaataaatacgtgctttgctgcatataatttttcaaaggcttacccattttataattttctgatggcatttagaaaggttcttgttgtatgcccaaagagcgtaattcctctttccattctgactagaattaatatgttctgtagcatatatgtattataaatatttatatgtacatataaatgtatatattatagcatagtaattaacaggctattcaatttaagattattttaaattcctcacatatcaaaatctgagttatttagacactttatgagttgcctaaatttgaatcaacactattagttttctaaagttgcgtaatttgtatttaattcattgttagttttctgaaactagtaatccaacttagtattgggatttctgaggtcctaatctgccagtagaaagaaggcagttgaaatattttaaaaaatcaatccttttttttatttgtgggcaaaagacatgtaagtgaattagttgattaaaatataaggtatttttctacaatacaaagctatttttatctattctgtgaagaaatactggcgagttgatgcttaaagccctggaaatatttatgttttagcctcagggaagatttatgttttggaaaaacttacagttggctcgttcgacatggaggtgatttatatctctttcgttagatgattaatttgagaataactccttctgcccttttgtttatagtttgcttctgtttcaaaaggcattttaaattgttttcatcaaaagtccaaattatgcattttaaacctcaatcagtaaaactttctttcctaaaagtgctatgcattgacaatttgtgacttttacaaaagagttattttatttcatgttgaaatactcagcaatctagaaaaataaattaaaatgtattttaaatgccattagaaaattataagatgggtaagccttttgaaaaattatatgcagcaaagcacgtatttatttcagccataaatctacattaaaatcagtttaattcaattctattctaagcatttaaaaatctttgtggtaatgccttatattgatatattaaatggaactaaaaaatgattggtctctaaaaaggattcgaattatattaattccaattaactgattttaacaaaccaaaaacccatgcagcttagctcaggaattatacagatcaagggaccaggctacctgagtttgaacctaaccatgtttcttgacctttctgtgtcatctataaaatgtgatactaatatttcctattgtatagtgttgtagtgatgattaagtgagttaatatatgtaaagattttagaacaatgcctggcttctagtaaatactatttaactcttagctattgatgttattgttagttaatatgctaaatgtgaatggcaaaaatatcaatagcaatgagcctaaagttctttatgaaataattgctgacaaatgtttatagagaacttttataaaatcacaggatttttatgggtagaattccttcatcttaagaaaactattaactataaactgaattctaagtattccttttataaccagtgtaaacttcatgagaataagaaccttgtctatcttatttacaactgtatccccagagactaaaagtatttgatgtagtataggtactcaataaatatttcttcttcataggtagaggaaacaaatattttttactgacaaacaaattattaaagtaaaatatcacccaatcctacagtgaaaatatctacagaaaactataacatcacttacttggatatcataatgaggaggagattccctctttccagctaccaaacctaattaatttaggacaggtggtcaccttctcccatattaaaaattttcagcaataacaatattaatgtcacttactacccctgattatttttgatcaatttgaaagtcacgctttttgtgagaaacaggaattatctctttaagactcctattatctgttcattattctgcagacatgaacaaaagctttatatagcttaatccattactaaagtcatattttgcaaaatagagaaacactggatgtaaggccaggaaaccagattctatccttaaatatgaactattttgatttatttagttattttagcttgggcatatcacttagtaatatgtaagggtcaaacaggatgttgttaaggtcattttcaactctaaaattctgttattttctcttttacctttcctaaggaattcaatttcctttagctgtataccatctaatatctatctccttaataatattgttcttttccttaaatcccctctattttatcacattattttaaaaggatagagaataaatgtaaggaatatttaagtcagacacatgcccaatatagagaaaggattagacttaccagtgtcaagaactgtaaaagatatgagattttacccaacttgaataataacaacttagcctgccacagtttcatcaatcctggcagaagacatgaaacttctgagtcagagaaaaaggcattattactcatggcagcaagcagcatgagccttatgtttgttttggttgcccttgcccccaggtaccagaaacaacccaggtaggtgccacatattcagtgggtttgcatcacagcaaagtagggaaggcaaatttttaaaaaatggattgcaggcaaacttgccctttgccaaaagggagactttatctttaacattctaaacagtaagcaaatctatccttgctttgcggcataaacatcctttaaaagatagcccagaacaaaagggtggttagtacctccctcgtaagacatgcagaagcacaaaagcctcatggaaagacccattgtctctcaacaataccatttttcatttctatactgtcttggtgtctggcaaattttttatgagtataccactccattaacagctctgattaatattatcaatagagactgtgaccaaaactattcaatttgtctcatatagcatttaattaaaggctactgttaatagaacgccaagcaagtagatgaggccagcctgcactattgatctcaaccctgtcccccaggattgcaaactcaaacagccgaatagatcccataaatcatccaagtctatcttagaaagccagatgatttgctccctacgtttctgaattggcctttctgcttgatttgaggcattaattcaggaacatcaacaaagacaaggacattttttagaaaactgcaacagactcagtgtgtctccgactttggcccaagtgggcaaccataaggatactgagctaacagtgtactaaaccaagtagtctttatctttttttatttaggaccatgtcaaggaataagaatatccagctggcagagccagaattaagtttgaatcctctagattcccttttggctaggtttctaccctacaggtgtaaagatagttcagaacctagagcagttagtgcctcactcacaagataaatagaaatgcaaaagactcagagcattgttgccaacaaccagctcttgggcattgcatttgtttatgaacaaatattagcaaatgttgctcttttgtttaccacaccatggctaactataccgctgactcattcagcttacaatcagctctagtcccggagtatctttttttctggtgtttttctattcttacttctcttcagtctatactgttgatttttcattccatttcttgtagaatgctgtcctatttcacagccacttcttagtttcctatataatctattctggaaagtttaataccttcatgtatcaaaaatgtcaagggtcactctgtgtcttcactctgataatattgacctgaatccccagtaatggattaagataaagcacattcaaatatatcttattttctaaagatttatttggaagtgcaagtagaatatattagaagtagatagagtttgggggtcagacatacttgctttaagagctcagctccaccatttatttaccatgttatctttagagaattcatcttctcatctataaagggaatgcttctatttcttagagttgttaaaattaaataagatcatatattaaagtaactggtggaattccagacacactagcaggtatgcaatacatatcaattctctatccccttcttaatttactattgtgaatgtgtggaggccatcaaagaatgtattgaaatgatattgaaatgttgcactagggcttccacattttgcttctgtgcaaacatggaagtctttttgtatgttatgcattattattttacttactattatttgcttgttatggttctgtaatatgcactctatatctgagaatataatgaatctcaaattatcttgatttactcaaggacttttttagaaacttgaaaataacattctgattgctccatttcattgaaatattaaaacaccaattgtaatttactttcatgccaactttctagtgactggtaaattgaaaattagggtttttttctgactttgatagattcacaatctgattatttggaagtcacatactacccatgttaccaacccaatagactggaaagtgacactggaacaacctgagcatgtatgtaacacatcataactaatcttattaatgccattagtactgaattggagttacactgacacaaccttaccttatttagtccataaaattaggtagttcgaccgattaaccctgtttctaaaaggttatgtttaaagaaatatttgtatatagacttattttttcattgacctgcaatataattcccatagaaatgaagttagccctcagatgtatttagatatcatatttctaacatttttaacgttcagtcttttttgtcaatataaaaattgccagcatatatttttccatttaacacccacaaattgtgaataaataaacaatgcaactacatttcactttatttagtgcatgtattaccaaaattagccatattgttaattcttaattcatagggagggagatctcacagattttatgaatgaagaattaactataaatatttaaggatccactctggcattttttcaaatgttctgcagaattaacaagacttgttcaatttgtaacatcattctgcctgattctgtcaccaataagtacaaattgagtctaatgacaaaatgataaaaagatattttggccaggtgcagtggctcacgccttaatcccagcactttggaaggccgaggcaggtggattgcctgagatcaggagttcgagaccagcctggttaacctggcaaaactccgtctctactaaaaacacaaaatttagctgtgtgtgatggtgggcatctgtaatcccagctactcgggaggctgaggcaggagaatcacttgaacccaggaggcggaggttgcagtgagctggaattgcgccactgtactccagactgggtgacaagagcgaaactcctctcaaaaacaaacaaacaaaaaagatatttcacatgatatgaatagccattttttgtcatccaaattattaacaaatcactgcaatttcagaaaagcttctgttaacagtaatgacaacttatcatctttgtactttagaataagttgccaggtatgaaaattagggcaattccttactatttcaagtgctaaatttgaatctgtatgtaataagtaaactttgagtattagcttatttgccttaacttgtttaatgttttaaataaaattgtagtacttttcaagtaaattcatttacaggattaaagaatcaaacagtactgttaaaggcttataataaaaaataccatttcaataaatgcattggggacaactacatagcatttgggaaaacacaaatttgggtttgtacatgactactgtgacaatgtaaatatcagatggatcaagattttaaaggtgaaaactaaaccacaaaagtcctaaagaaaacataagaattttaaaaataattaagcataacttttaaaatatattttaaactggaggtataaatagaaaaaagatagtatattttactgcatgagcaaacaactcctatataggggaaaaaataccccactaaactaaatcaattggccagctgggaaaaaatatttacaactcacatcataacaaacaactacatatccaaatatagagagaaattcctccaaatcaatttttttaaatcccaagaagaaagaataatatggcttttaaacatatgaaatagacctaaattcactcatcatttaaaaaatataaagtaaaacacctctgtgatactagttttcgcttataagattggaagtggtcaaaaagtttgatagtacactatgttagcaaatgttgagaaacatacctatacattttagggcaagtaggtatggatataatctttatggagggcaatttgatactgtctgtcaaagtttcactctaggctcattcatttataaaattacacatgtaccaggttgttcatttccatattgcttgtaatagtaaaaaaaaaaaaatagagacaacctagatgtctagctacagatgaatggttaataaagttataaaactttttatttaaacaaatataaaatgttcacattttttggcgtggcctggtggctcatgcttgtaatcccagcaccttggggggctgaggtgggtggaacacctgagatcaggagttcaggaccaacctggccaacatggggaaacctcatctctactaaaaatacaaaaatcagccaagtgtggtggtgggttcctataatcccagctatgcaggaggctgaggcaggagaatcacttgaacttgggaggcagaagttgcactgagccaagatcgtgccactgcactccagcctgggagacagagcaaaactctgtattaaaaaaaaaaaaaaaaaaaaaaaattcacattttaatgactgtaaatattgtcatgtgcagagctaagtggtgtaccttttctttcttgaatagtttgtcgtttgtttcggtttgttttttttctggcatttctaattctttctactttccctgttattgccttccatatttttcaaattttctcattgagtttcttgttttctgagagtatcattcagacctgctattccatctgttgtagggagctttctaagccatctgcagaattcccattctgtgactacctttatttttttctctgagttgattccactgccgcttgttttccttgtcatctccattcttggttttactccttcgtttatgtgaacatacctttatacaaattatggaaaaaatttgaaaggaaggtacgtcttctgggattttacacatctaaaaatgttttgttttgttttttcactttcacacttgattgatagtttatctgagcatagaattcttgcttgaaaattatttccctaagaattataaagatttttcttgagtgtcttctaacacatgttgctgctgagaagtctaatgcctatggattctttttcctcttgtgctcccaagaagagagaaaacaagaatactttcttctccagaaagtcttcattcaagaaagcagaagggagggacattttctacatttcctttctggttgagtagaactacacttacctctcctccttcacctgtgccgtgtgattcatgattgagccttatgatctatgagagcatctctatgtagtgatgaagcacttgatgtttagacattcttctcataatagagcctactttttcagaccattgtcttgtgtgaactcaacaatccttatactattgcaatcttaatcctcctaagaaaatggatgcttctggcagaaaggaggaaggccagtagaaagaagttaaaaagagacgatacttcaatctatatttttaaaacttaaaaaaaaattattacagcatggagcatttttctcctcttaaacgtttgattttcaacacctcactcaattgcaaattgagtgatattgtataaaccatcttcacagttatcagcattaaatacctaggtctttcatgtagtatgtgagtatttctgtactgatttattttttaagccaaaaattactagattaagtttcccatggtctagtcatttatgttgcataacccaaatgcaaaagttacccatgatattaaatttgaaattacatgtatatcatgctgcccattgttccaaaaacattggaagacattttaaaaccacatatgtatagattgttccttctgtctgcagtagaaccatgttcatgttttcacgtggccactgacctttggcaaagccaattcaaaaattcagactattatcatcatcagacaaatcattaaaatggagtcaatcatacacccacttgcataaatcattaagacagatgatacaaatggatttgacagaccatgacctaccaattttttacttgtcaacaaagcttagagttaactgaaataaaaccatttcatttagtaggttactgccaaaatataacaaatctatacaaagtttttcatagtcaagaataatttaaaagacaaaattaccaaaatatgaatgtgcttatgataaataagtgctagtaaacccagaataattaccaaagctaaaactacaccattaaaaatgatataagcattttaaataacttgattgtttctatttttagtagttaatggtttgtatagatactttaatctcttctgttcatgttgttttttcagaaaataagtacttaatcctaatcaatgtgagataaattaaggaacgcaggttatatttcttcttttaatgaagggcaaactcctccagatgtaagcatagcatctatttgcagtactgccacataagaagtaaaaatagcttggattattttggtatcaagtaggatttgtagatgaagaatattatctaaattggattttccatagctatggcagttaatattctaactgctgcagaagtaccaagagaaatgcaaagaatcagaatcttagcagtcattcatccattcgacacctactaactgcaaggcacactgctggataatatgcagtatggaaagtgaggacatacacaacttaaaaaatggaaagtctcataataggagcaaaaattattgttagaagagtgcttatgagaagtacagatatcacaacatcattccagattcacagactctatgttctattattcaattaaaaatgtttttagctttattggcttaaacaatagcgacagagaacaagttatttcaggacctatataataaaaagataagttttctgagttcaaaaaacatgggaaaagattatgattaaaatatattcctgcaaccacatggaacgatcatatttcattgtgtcccatgtctgaaatgattccaggtctccatatgaaattgttaagttttaaaagcactatgtgtaacctctaatttttaaatttttgaaggcaggataaaattgttcacccagttagggaactggtttactacaattggtaatgattgaatcattcttgtccaccctaatatttcacgagattttctttctagcacagctcttcctattctctcttatcagtgcttccggggagatttgtcaaggcctttattagtgtgtggaagagacgctagtgttccttgtttcacagatatctatttcctagtacacactgactactgattttgataaaatgataggcttttatacaaacatagaattccttttctaaacacttgtgcacccttaggaaaatttttttcttatgataattggataaaataacataacataaagctggtcaccctctaatttattaacataaacattcttaaattctacttctcagaactaatgtaaaagtcacttcctttctggctgctctagaggttaaaaaaaattatggcactaatagagaagtgaggaaagttaaaattaaaaaaaagaaaaattacttcttgagagtggactatatattatatttttacttatttgcttttttcttttataaaactcatttcctatcctagaacaattcattttcaagagaagaaagtgcacgtataaaacaaaatttcattccgatgtccccaacttaaaactttattcctgttattcccatgttaaaggcacaaaattttctgtaaaaacagataaattctgttttccattttattttcatacattctatttgaaacacagaaaatcccctagtagtagtttagaatttatgcagattctagttaatcttatgtttcaagtctatgaagcatattctaaagcaataatcataacacttaaaatacacttgcataacatttttgttgaagtgggtattaggtatcatatgcactgcaacattcctggcaagggagtgcatgtaatactttaaaatgaaacttccctttttcacttcagctccttttcttgattaagaagctgtaaatgtatcttgcctcttttcacaaatgaaaatgtgttcaaacgtaattaatctaccctattaactctacaaaacatctgctatatttgttaaacacttcaaacttctgttctgaaccagttaattctaagtaatttctcagttaaatatttacatgggcttccatgatgataagctctagcttgtcttaaataatcagcagattgtccagagagagctgtgtgaaatgtaacacattgtaatagctatccactggaacttaaaatggttagctggcttggactattttttgcttatttttatcttagccaaaagaggtaacagccttatgaattccattctttgtcaatatttttaatgtccagaattgtgttaaacggaaaatgaatacctatgtagacctatgcagatgtttaccttgtgaaaatgctaaatccaatctcaaatgtctctttcagaaaagtgataaatctgtatgtgtgcaaaattttagaaataactcaatttacagttatttttatagcagactaagtaaattaaaaagtagaaaacattgataggcatttttcatcagcaaattaaattgaagaagaaaaaaaatccacaggctatgcaaatgtgtggtgtgtacaaagataattaagactatgattctctaactgcacaaattatataaatctgtaaaatatcaggttttggtcaaaaattggaataagttccacaacagagatgctgttacaatggtaaatgattaatttgtaaatgaactataaggcaatttttctcatagacatcagagaatagaatgatcacttcagactgaggaagacagacaagattgaaagttctccaatgtggtaattaagtccaagttttgaaaataaaaatgattatataaagagcagatgccagttctccaacaccaacactcagtattgttctaactaggtgttttcttctttacaatatgccaaatgtttattgagttccttctataagtattgtagaggttagaaaaaaatgagcctgtatcctctacagcaggggtccccaacccccgggaaaaggaccagtaccagttcgcagcctgttaggaaccggaccacatagcaggaggtgagtggtgggcaagtgagcaagcttcatctgtatctacagccactccccattgctcacgttactgcctgagctccacctcctgtcagatcagtggctgcattagattctcataagagcatgaaccctattgtgaactgtgcacatgagggatctaggttgcgtgctgcttatgagaatctactgcctgatgatctgtcactgtctcccatcacccctagaagggaccgtctagttgcaggaaaacaagctcaggactctcactgattccacattacggtgagtgtataattatttcattatatattacagtgtaataataatagaaataaagtgcacaaaaaaatataatgtgcttgaatcatcctgaaaccatgcccccatcagggttcatggaaaaattgtcttccacaaaacttgtccttggtgctgaaaaggttggggaccgatgctctagagctcacagtcaactaaaaggataaatgaagcacacacataatgacctttacaaaaccagaataaggaagaactgtgggagggattctgagacaaatgctgagctctatccaagttcaatttacataaactggaggttaagtatgtctgtaattttcataataagtgatcgataaatccactgtttgactttactaaatgggaggaacagtgtcctggatcattataaataatcctcccagaattttaatttgttagtttgggaatagatattatttttctacagttgattgatctgtgttttactaatgataatattaaaattatttttgctttgtcaatttcaactaatgttcaatactcttctcaaaatgttctgaagattaggagagcatggctagaattacaaattggtcttggatcattcaaagagtgaatgattcatcaaggattaaaaaagaatttcctcaacttctaatcaaacccatagctgggtcctagacttagcaaaactgtggaggaggagatcagagtcatggtaacatctaggaggcccgtaagtgatttatgtatgtgagtttgtaccatatcttagtacttgagtctcgcatacaaaagattatcataaatattttttgcgtttgttaaatacattccaaatcaaatattatatccttgcattaggtagactttgctacataatttctttaaatagtaaagggagtagatttttgattatatgtgtctcagaattaagtgaactccctgatgtgtatgttttagtaactcatgtttaaaaacactgaatgagctgtcagcatttggatgaatatcaaaaatgttatatattagtttgactattcatgaaattataatagttttcctaaggataagagagaagagtttaatctagagccaagatcgtgtcaggcttataaaaaaatgacacaacctccctgcaattatattgtaattaatacttgttatatttgaatttcaaaatttgtttttcttataaacactaggaatttgccattttaaagttggcctaattatccaacattacttgattatatatcatttggcaggttttgttgtttttttgtttttaactacaaacagaactgattagtttttttcccttttttttcctacctaaatcaataaaacatagactccatatgcccctgtaacattaaattgctcccaaagtagataaaagaaatgagagtgataaatacataaatttcattcaactgttgtggagaaggagtaacaaagatttgggggaacagtgagaactgatgacatatgcagaattttttgtactaacactttaaaaaaattagttacaataatttatactgaactctgagaatattaatcaaatgaaagccatctgatttaaaaattaaaatacgtatattacttttttattcaaaataaaattagatggtgaaattaagcatgtatgacattcatgaaaatttagtaataaaataatttacagacaggcaaatgctgagagattttgtcaccaccaggcctgccctacaagagctcctgaaggaagcactaaacatggaaaggaacaactggtaacggccactgcaaaaacatgccaaattgtaaagaccatcaagtctaggaagaaactgcatcaactaacgagcaaaataaccagctaacatcataatgacaggatcaaattcacacgtaacaatattaaccttaaatgtaaatgggctaaatgctccaattaaaagacacagactggcaaattggataaagagtcaagacccatcagtgtgctgtattcaggaaacctatctcatctgcagagacacacataggctcaaaataaagggatggaggaagatctaccaagcaaatggaaaacaaaaaaaggcaggggttgcaatcctagtctctgataaaacagactttaaaccaacaaagatcaaaagagacaaagaaggccattacataatggtaaagggatcaattcaacaagaagagctaactatcctaaatatatatgcacccaatacaggagcacccagattcataaagcaagtccttagagacctacaaagagccttagactcccatacagtaataatgggagactttaacaccccactgtcaacattagacagatgaatgagacagaaagttaacaaggatatccagaaattgaattcagctctgcaccaagcagacctaatacacatctacagaactctccaccccaaatcaacagaatatacatttttttcagcaccacactgcacctattccaaaattgaccacatagttggaagtaaagcactcctcagcaaatgtaaaagaacagaaatcacaacaaactgtctctcagaccacagtgcaatcaaactagaactcaggattaagaaactcactcaaaaccgctcaactacatggaaactgaacaacctgctcctgaatgactgctgggtacataatgaaatgaagacagaaataaagatgttctttgaaaccaacgagaacaaagacacaacataccagaatctctgggacacatttaaagcagtgtgtagagggaaatttatagcactaaatgcccacaagagaaagcaggaaagatctaaaattgacaccccaacatcgcaattaaaagaactagagaagcaagagcaaacacattcaaaagctagcagaaggcaagaaataactaagatcagagcagaactgaaggagatagagacacaaaaaacccttcaaaaaattaatgaatccaggagctggttttttgaaaagatcaacagaattgatagaccgctagcaagactaataaagaagagagaagaatcaaatagatgcaataaaaaatgataaaggggatatcaccactgatcccacagaaatacaaactaccataagagaatactataaacacctctatggaaataaactagaaaatctagaagaaatggataaactcctcgacacatacaccctcccaagactaaaccaggaagaagttgaatctcttaatagaccaataataggctctgaaattgaggcaataattaatagcttaccaaccaaaaagagtccaggaccagatggattcacagccgaattctaccagaggtacaaggaggagctggtaccattccttctgaaactactccaatcaatagaaaaagagagaatcctccctaactcattttatgaggacagcatcatcctgataccaaagcctggcagagacacaacaaaaaaagagaattttagaccaatatcccagatgaacatcaatgccaaaatcctcaataaagtactggaaaaccgaatccagcagcacatcaaaaagcttatccaccatgatcaagtgggcttcatccctgggatgcaaggctggtttaacacacacaaatcatataaacagaaccaaagacaaaaaccacatgattatctcaacagatgcagaaaaggcctttgacaaaattcaacagcccttcatgctaaaaactctcaataaattaggtattgatgggacgtatctcaaaataataagagctatttatgacaaacccacagccaatatcatactggatgggcaaaaactggaagcattccctttgaaaactggcacaagacagggatgccctccttcaccactcctattcaacatagtgttggaagttctggccagggcaatcaggcaggagaaggaaataaagggtattcaattaggaaaagaggaagtcaaattgtccctgtttgcagatgacatgattgtatatctagaaaaccccatcgtctcagcccaaaatctccttaagttgataagcaacttcagcaaagtctcaggatacaaaatgtgcaaaaatcacaagcattcttatacaccaataacaaacaaacagagagccaaatcatgagtgaactcccattcacaattgcttcaaacagaataaaatacctaggaatccaacttacaagggatgtgaaggacctcttcaaggagaactacaaaccactgctcaacgaaataaaagaggacacaaacaaatgggagaacattcaatgctcatggagaggaagaatcaatatcatgaaaatggccatactgcccaaggtaatttatagattcaatgcaatctccatcaagctaccaatgagtttcttcacagaattggaaaaaactactttaaagttcgtatggaaccaaaaaagagccagcattgccaagtcaatcctaagccaaaagaacaaagctggaggcatcatgctacctaacttcagactctactacaaggctacagtaaccaaaacagcatgatactggtaccaaaacagagatatagaccaacggaacagaacagagccctcagaaataataccacacatctacaactatctgatctttgacaaacctgacaaaaacaagaaatggggaaaggattccctatttaacaaatggtgctgggaaaacgggctagccgtatgtagaaagctgaaactgggtcccttccttacaccttacataaaaattaattcaagatggattaaagacttaaatgttagacctaaaaccataaaaaccctagaagaaaacctaggcaataccattcaggatataggcatgggcaaggacttcatgtctaaaacaccaaaagcaatggcaacaaaagccaaaattgacaaatgggatctaattaaactaaagagcttctgcacagcaaaagaaactgccatcagagtgaacaggcaacctacagaatgggagaaaatttttgcagtctacttatctgacaaagggctaatatccagaatctacaaagaactcaaacaaatttacaagaaaaaaacaaacaaccccatcaaaaagtgggcaaagggtatgtacagacacttctcaaaagaagatatttatgcagccaacagacacatgaaaaaatgctcatcatcactggccatcagagaaatgcaaatcaaaaccacaatgagatattatctcacaccagttagaatggcaatcattaaaaagtcaggtgctggagaggatgtggagaaataggaacacttttacactgttggtgggactgtaaactagttcaaccattgtggaagacaatgcagcgattcctcagggatctagaactagaaataccatttgacccagccataccattactgggtatatacccaaaggaatataattcatgctgctataaagacacatgcacacgtatgtttattgcagcactgctcacaatagcaaagacttggaaccaacccaaatgtccaacagtgatagactggattaagaaaatgtggcacatatacaccatggaatactatgcagccataaaaaaggatgagttcatgtcctttgtagggatatggatgaagctggaaaccatcattctcagcaaactatcacaaggacaaaaaaacaaacaccacatgttctcactcataggtgggaattgagcaatgagaacacatggacacaggaaggggaacatcacacctgggtcctgttgtggggtggggggagtggggagggatagcattgggagatatacctaatgtaaataatgagttaatgggtgcagcacaccaacatggcacatgtatacatatgtaacaaacctgcacgttgtgcacatgtaccctagaacttaaagtataataaaactatatatatataaaagaaaatttagtttatatgaaaaaaattaaaaatgaatatatacataataagtaactatggatcatgataagtacatctggccttttagtttcaacgtagccatcactttttagaaaaaggtcatattataaaaatgaatgttaattatttttaaattagataacaaaagaatttcttctggaataaggggaataaatttacatttatttgcatttgtattatcagatttttcatttatttcaaaccatttaaggcatttaatagatgatgggtgaattataaatatttggaaaactttttgaaaattactgcctttatccaaaaacttttattggagtggatgagttccccatgtgaattgtcatttggccagtaacaggcacataccgtgatgaataaaatatagattctgttatagattagagcctggtgagagtaacaaatcattacatgaataatcacttaaatgaattagtggtaagtacttgagagaaaaagtgcaaggcactaggagactgaaacaaggcattgtctccaagtggtacatcagggaagatcaagcctggttttcttaagatcagtttggctgtgatgtgaatggatggaggaatgtgtagcttcaactaggaagctcttacagatgagcaagaatatgggagcagcaggagtggagagaaatggatgaatccaaacgtatcttgtagataaagccaacaagattttgtaactgtatgtgagagagaagtttaagagagttgaatgtggagaatgagttctagatttctggcatgagcatgaagagagtgtggtatggatttattgatttggggcatggtggaagaggatccagttctggagggaggatcctgagttcagcatttgatggggtaaactgtggatgcctgtgaggtagcagtggttccatcaagcacgtcgtgggtctgaatgcagctcagagataaactggagttgtagatctgggaattgctggtctagagaatccaaagcccacagatgtgtgagatcaatgtgagagaatgtggactgagaagaaaatgagacaaaaatctcccgcatttaatggttgattagggaagaaagaagcagcaggaaagaagtagtcataactgctgaagttttttttgaatggcaatatcatcatttttaatttcatgtggagtaagaatttctgtctaaaataagaatcaggagacttgactttcagattaatacctgggatttcctaggactttgttatgatctgaaaaaaaaagaatgtttattttccctaccactttatattattacaagaaagcagtaaataatatttttaatattaaaagttcaatgttatgagtaggcatgtttgaagccaacaccataatcatgcatttccttagaatatactttaaaagctactctcaaccaaaaatataattttatttatagagtttaaatgtataaagaggtatctttttctgcttgcaaatattgttaccacttatttatggtggtttgttgaaacatggttccaatcatatgagattcttcactggcggtgaacatttggtctcacacctggtgtgggtctgcctttttttctttctggagttagctacaaagaagccagtcaaagaagggcaattcatcattattaatatattatatagttcaaccttgaaagagctcaaattactttaaaagtttgttttaatcaacaaaataattattaattttcacaacattctttgtgaggcaggtgtacttgaaacagtgtattaacatgtgtctctttttcctcatagggttccctggggatacaaggcccccaaggtccacctggaaaagagggtcagagggtaagtaaagctggaacaactggtgggcattactaacttaggggatacttatttgggaacactaatgaaaatgaaaccgaaatagagcaagcagatgggcatatggagagtatcaattatccaaaggctgaaatttgagattcgagattttgacagaggttttgcaattcagaaaattctatatttttcaagattggcagcacaagtgtagagatattgtttggataaaatgaattagccctaatttgatctacactactttggtcatacttttagtttttgaattaagttgatgagtatctttgtggaggtctagcctatttattaattccataaaggttgtggatattaactacattctttatccaaattaaattattgacttcactggcttttcataactctcctttcattgccatttattgcctttaactgagacaaaatagtaagcaaataaatcatcgttggaattggtagtagagcaataacctcctatttctagtgcagttcaatttcatcattccacagtaaaacgaagccctgcagtgttatgacaactggtcagcttcatatgagcagtggggaccccattcttgtgttttactgttattattatcattttcaaaccattttaaagtctcaaaaaatcttgtgtgttctttctcatgtgcttatttatggcagtctttgtactaaatagtacaggtactgtcaacttctgttcccttgttgatgagcattccatgacttagagtttagatgatgtgcctaaacttgagcttctgactgtagtcctacgttctcttttattattaaccccaaatatgtttcttagacattctcatttattattcccagttctgccttctgtaaaataagtctctttcctcaactacaaatatttgagggtcagtggtgtattgtactaaggtttaccttttatcaagttaataaaattccaattctcttaacttgttctcttatcgtatggattctggactctccaacatgccaataatctttgtcagaaaacactcattggctttccagagttgtcgagaatgagactggatacatgtggtcttacttagggcagagtaaaatgaggcaagtacgccccataccacagacaacatgctactattatggcctaagattgagccaatgctcctttgtctggtattgtacttttgacttgtactacatgtggtcaattaaatgctcctccctttttattttaatgaaaactgctaagtcaggtcttcacccagcccgttgttgtacagttacctttttgaatcacagagtaggaactgatccttgttgttaaatttcatctttattgattttaatccctaatagcattctattctttgggggctttttgcttttaaaaaatgatttgaatcctgttttccagtgaaatatccctcagccttatgctactttaaaatttgataagcctaccttctgtcttcatttaaatcgttaataaatcctgaacagaacagggcctgacaaccctgtgtaacaccagcctaggctaccatcttttccaccattgatgtccttaaagtgtgacaatcaaatcatgtacaaatgtatttgaaccctaccaccttcccacccacatttcttgatttggcttgtaagataattatgacagacttgttagatactgggtgaactgaaaaaatatttaaatgaggctttttagaaataataatgcttcaaattaaaattgtaccctatcaaagcttgcatttcataagaaagtagattaaagaataaattaaacatgtattttccatgataataaagaaggaaatcagttaaattgtaaagttcaaccactattttatgtaaatttactccatttataaatgcgtatagtccagataattttatattacttttatcttctatcaagagtaacataatgtcagaaactaaaaaatgtaatagaacttatagacacttttaggcatagttcgtcattattgctactgctctttcccaaatgccctatttatcaaaagaagtagctagagcaggtattattgacattatccacatttacaaataattatatgcatttggattatatccatatatgctcagtgatttattctactttataagctacttgaatgggaaacaaatgaattttaaaaatgagcgttcttacatatttacatttaggtccaactgagtgccaccatttcttctcagctcaatagttaaggagtactcagctctttcagacatataaatgtatttgtacatgtatgcctgtgtatatacatatgtgtgtatacatacagatgcacattctgaaagctaagaccaataatttttctatttcactaaagtttgcagtagaaaacaatagtgagaaaaatctaggaatttaaaatcatttttatttacccaatgttaaaaacctcttgtattttaattgagtggttgaccaagaaggtattgactatcattaaggctatttaaatgaaacataaaatatgtgaagttttatgtactttattcctagacataatgactttaattaaagcagaacatttaattttaaacaaatcattaacttgttggttttcatcaatgattaaatacgtagtagctactactctaccaatatctcacaattatggtgagtttcaaacatgggtgtcacatttaaacatgctttgaaaaatatcaaacattatagaaacatgttaatattgctattattattatgaaagacataggattctgatcaatgaattctttttctttttctctttaactctttgtgtagtttcctataagcataatagcaacactatttttgcaagtaccacgccaaggttctgtttgaaattttgattagttgattttatttttttaattatcatttaagctgctaaatcttagtttataaagtgttcatttaataaaatgtagaagtaatgtgcttcttacacttaaaagctattcttaacaatgttctgtgacaatatgtatctgaaatttatgggctgttttatttctcaacttcctgattttcattttttggatcttttatatgccattatttatttatttactttgtcttcttgaagccctgcaagcaaaatatttggttgacatattttttagtcttacatcctttatggattcacacagtttttagaattcaatgaatgttgaatattgatcctaagctacagatgagaatgtttcagatcacgatgagggagaacagaatggcattgggggttgggggccttcctggaagttaagagggggtttaatccatcatgaggcagaaaaaggccgtacagaaccaagaagtcaacagaagagcggttctagattcttgaagggttcagcagaattaaaatttggaacaaagtaagtggagggatgctggataagagaagtggctggaattggtgccaggggagagaagttcggttgagtagtgaggagggcactggaaacaaaaatctcaagaaaatgtgtaaggaaattagggcatgagttgtgaggtaggagaggcaaacaatggagattgtggtggagggaaaaggacaggaactggatggaaacccagagaagtatctttgtgaaaagtggaatatttcaggtagcagatcatgttcatggatattaatgagaaacattgcaaaagaactggcattataaaaattccatttaagatgtaggttccttgcaggatttcttagtattcctaacaaacagactctccccaaaaataatgaaaacaataatttttatgtaaccttgaattttcattttatagtcacattaaatgcacatctgaataatctcaaggttagcgtgaagctaccctggtctttttaaaagaagttcctctaggtctctgaaaaaagacatttactggtgaatcaactagttactgccgcaaacagaagtttgtgtggttggaccaagatgacacctcactcttgcactctgttgctggatcctaattttgatcctgaacagaaactttatgttttaaattccctgtaacttacccctctatcctgccctgtcttgctctcaatttatcctctctgcctgtgcctgtcctttttcccctctctgggcaaccatcctcttgattgcctccttgcaacatttttgtgcaggttttactttcccttgaagtgcttgctccaagctggctttgaagctgtgtctggagtcaggattccttgcattctaaacagcacagagaacatcaacctacctacccctgcccccgtcaagatgtgtttctttgcaccagcccacacttgatggcaaaggggctgggtcacatttcctccatgagctgggagcctacaaaagtacaggagggcagggcaagcaacatgtccactttcatcttatggtgcaagcaacttggaatttagcatacaggttgcaccacagactttggggccagattgcctgaattttatttatttatttatttatttatttatttatttatttattattgagagagagttttgctcttgttgcccaggctgcagtgcagtggtgcagtcttggctcactacaacctccacctccccagttcaagtgattctcctgcctcaccctcccaagtagctgggattacaggcatgcaccaccatgcttggtgaatttttgtatttttagtagagatggggtttcaccatgttggtcaggctggtctcaaactcctgacctcaggtgatccacgctccttggcctaccaaagttctgggattacaggcctgagccacagcgcctggcccagattgcctgaatttaaatcccagctttactgcttatgagctttgtgatcttgtgtgaattcctcagccactctgcacctcacatgcctcttttagaaaatggagatgctaataacgcctaccccacagggctgtgatgaggagtaatgccatgtcggtgttagcctagtgatctcaagatgtttatagaagggaatgtaggtatacagcttcagaatattagtacttgattaaggagaatgtctaattgatcaagaaaaaatatttaagataaaatgacttttttcactactactctgttgaatctattttatttaaattttacctgaatcttactttacctagatgtccatgcccattttctaatgccccagaagcttgaggcccagtgttgatctaacttgataataaaattaagtatgtaaaaatgtctgcaaggtagagtagactattgccttttccttaaagaaagatatgaagattggtgtcatcactgtggagtagctgagacctcaaaatttgtttgatgaacaaattgtgctgatcatgtgtaaatttactgggattttcatgtaaaatttacacttggtttttcttttggtttgattctgaactggttgatatactttacctaagacagcacaagtaatgaattatgttattaataagtactggggtatattgatctcattaggtaaaaggacatcaaagtcattgcttctatgaaatcaacacatacaacaggactcacttaagcaaaattttccttaagcttatttgtttttacagggcttgggatatttttcaagtgaaattgtgccctcatagtctagccatgctctatgaaaactttgtagaacacagcaagacagtaatgcaggtcagacctgcctcacagtaaagtaaaaaaataataataatagtgtttcattgggcgcggtggctcatgtctgtaatcccagcactttggaaggccaagacgggcggatcacttgagatcagaagttcaagaccagcctggccaacatggtgaaaccctgtctctactaaaaatacaaaaattagctgggcatggtggtgggtgccagtaatctcagctactcgggagactgaggcaggagaatcgcttgaacccaggaggtggaagttgcagtgagccgagattgtgccactatactccagcctgggtgacagagcaagactccacctcaaaaaaaaaaaaaaaaaaagagagagaaagagtatttcttcttactttaagatagcttattccaagttaccaacttcacagctacaaagtgatctcattgttccaatgaaatgatttcagggtctggtagaaaccactaacaattgtctgcagttgcacatccttacacaggcttgaattttagagaggagtcttatagagaaaagaatggataattatgaatttataggaagtaattttgttagtttcacattataacaggtgatatgattgtcttcttatctttatgtgtcaaaactgacaatgacctttaaaatgcacgatgagtgtttcataattctgctctcactaaaacgatgactggtgtccttccaccaggaatttgtattactagcaagaaaaagtcaaaaattactttaaataatagttttaactctggtcgtaggtagaaaaaaagcatcttttttgcttggattcatctataaatataaacgtataccttaaaaataacacgttaaatgttctgtattctacaactattggttcatgcttattacttgttagaaaattcttggcatacagataacatcgtattttatttacttgctatgacatttcttcagaatgtctccatgaggattatcttgggagtttgcaagagataccatccttaattctgtctgacatttctagatgaataacagggaaattgggtaccctattcaggtccaagcaacaagtgcagagctttctccaacacattgtttgaatttacaaaaccaaatatgaaactcggtggataaaaataagcaaatctgcatttatccctgcatctctgtttgcagagctccatggtggactttggccgcttggtgtctcctaaaattggatcaaatatagttactgaagcaatgtagtaagacaggaaaaagggggaaaggctaatatatgttcatgtcaaacaaatgccttcaagggcgtagttgtgcagcgaggatagtcctttacttttgcctcatattctcttactggtgggaaagataaatcaaggaaaaagatgttggaaaacaacttctagcacaggctaattaaaatcagatgaacaagagatgtagcccagactttgtgatcacaggccatcccttagataaggttaaacagcacagctagttactgacagtgtgcctgtgtctccttgtggtaaatttcactctaactagtggtctctgcagtgcacttgagatagaagagacaaaacgccctggaaaggctgtcaatgagaaaaaaaaaaattgtaagcaatgattttgttccaataatacttatatcaatagtaaagcaacagtgagctgaggtccttacattcacttaaatgaagagctgaatgacattatttgtattgtaacaaaataacataataagttttctcttttatatggattagtaaaggaaaaatgttttgtattttcaaataggaccctgagtctgaatggtttatttatttatgtgaatagacccaagagctgttctctgatgtggaagaggcacatcatctaatggggactccttcaaactggagagattcagcctctgagccgagtggctgagagcttcagaaagaagcctggagaggtgagggtggacccatttcaggaacatcaaatcatcacattttctagctaaaggggtactatagtatcattccagcccaccaaataagaaaacagagacccagaaaacattggcaattctccaaggctgcagggctatttattctaactgttctgcataatatacacccattgtctattttgtggtatcacactgaaacccagatttgcatgttttaaaatagggatattgagaatttaaccaaatcactaacttttaaaaaagttacttaaaaatcactaacttaatttttctaattaaagccacacactagaagggacaaatataggtaggtacagctgatccctttatggtctccacacattgtgatgagcacacattctgtccctataacctgcaccaacatttgggaaccagcaatgcctggccagtgagggaccagggggagagtcagaactgctctttttttctcaggagagcaattggatcaatttgtgacttcagccaaatcactcaagactctagtctaaatttatctgttttatcataacttagccctcaggtatattatgggattaagccggaagcactttaaatgcactctggtgacaggtgttctatgaaggagtcttataaatattacctacttagccacagaaacacttaaagagaatggaaaaggagaaggcacattctgccaaagtggcgatatgctaatacacctgcatcaggatctttattcagaacattacactgaacacgttagtaactatttcatatgtttaccattggaaatgtcaagtagaaagttatttatccatttgggatggagcgaatatatgtgtggatggctgccaaaaccaagaattaatcacaagttattaatcaatttggaaaatataaacagataaattttcagaaatgcaaaacattcggagcatgaaacatttttatggcctaatgactttgaaagccagcaaattatgtttccaataaataagccctcaactttgtaaaactctatagtattttgagttaccttaggtaatggcacataattctcaaagcaactttaattttatagcacttttgtttttcttatacattatattttaattatcaagagagaagctattgcaaagtaaatgtgatgccataattctttaaaaagttgaaaatttatcttttatatgatgtacgtagattgtactgtgtttttatttctaaatttcttggaatggtagtattgagagtcgctcttgaattcttcagaaataccttagaaactactttttctcattttcctcaaaaccagtaaacttttacttggactttttttgtgtgaattattgtagattaatttgatatttatttgatatctctaatatgtccaacacaaacatatacatatatgtatgtacatgtatgtaagcattatccattgtgttttctaaattcacaacagtatacaacgtatgttgtgaccactgtattatggtgtcatttttggctctcaaatcactagacaatgcacttcttgaacactagaaaggactgttgtttgtatttcttatgtgagagatgttaacaatgtgtctatgcaaccgtgagaaagatgactgcagagtatctacaagtatatttaataccttgaatgtgcataaaattcaataatgtaaacacaatttatgtgcattcaatatttttattcattaataatgccactttaagaaaatcagtcttagaacatacaatgaaaagagcaagatatcattggaaaaaatctacaccttttgttctgccatattgaaggccgttgcttcacactctccattggccatgtgttttatgcagtcttccaaatcttttgcagaaacatttccatagctttgtgcatttattcaatcatgtttatagtttatttgtcttcgaaagtatttgagggtcttataaatgcaatcaaataaaaatctctacactgagagaaaaagacaagagctaatgaatagagagtaggaaagagaagaaaataagcaaaaacacctatactgagtgaggcaactgcatttgaacaaaaagcctctctgaaagatctgagggcctatttatttactcaagaaacatttgagtgcctgttttgtgtgacataccatggaagttggcttaagtcaggcttccctaaaagcagagcctaagatgggattcttgtataagcgatttacagaagaaacctgtaacagagtgagggaagcagacaagagaagagaagaatgcaggcaaaatgtggtttcaggagcatcaagtctctccctgatctcacaagacactctggagcacgacagaatttctcctgccttgaagcaaggggcgaggcttgccctcacagggtggggagatgggcagtaacttcccagtatctccaggccaggtagatcctgtagactaaggtaaccctccaggaatgggtgtagatagaagcttgtagcagccaacacccatggcaactgagcccaccctagcctggcaccaactgcacctgtacagaggtgaaataaaacacaatccttaacatcactgacacagaatccttgatggcttttgagtgaaagtgaagacatgattttaaaaagaactttgataatattaacctcacaggccgggttcagtggctcacacctgtaatcccagcactttgggaggccgaggcgggcaggtaacttgaggtcaggagttcgataccagcctggccaacatggtgaaactctgtctctactaaaaatacaaaaattagctgggcatggtggtgtgcacctctaatctcagctatgtgggaggctgaggcaggagaatctcttaatcccaggagacagaggcttcagtgagccgagctcacatcactgcactccagtgtgggcgacaaaggagactctatctcaaagaaaagaaaactattcttgtagtctaatcaataagtaataaagggcatgattataaaaaccagtgaaatggctgatgggagtgacatcaaggagattgaatgaacacagaacaggcaaaggacttaagtttcagaagtgattgctgacgtatcaagtctgaaatgatagtgcctttaaatgaagtagaaaacacttgaagaaaacattcttttagaagagatgagtcagtttgaagcctacagcattagggctacggaaagaatctgcaatcaaaagccccttaagatgtgagctgagtagaagaaccaagtttactgttagcaagtcatcagtttaagggtgataactaaagccatcacaatggggtgagggggcagtgtgcaagggagaaactagaaagaaaagaactgaaagtagaaccttgaaatttgggtaaacctatatataggaatggggtggagagatgaactagaaagtttaaagtatagaaaagtgggagaataagaagaaagttttgaaagggaggagactgcgaactgataggaaattcttcagaggtatcggaggatggaggttgagaaaaagccattggtgatcttgaaggaagctggtttcttagcatgtctgtgttgcacagaggcagacatgacactgcacggatctcaagagtgtagtagatattgagaaagtcaggggattatgaactattattctcaaaagctgaggtgtaaagagagatggcataagactacattgggagaggtcaaggaaaatctttgtttctttttttctcataagtgtatatatatatatgtgaatactcaactacgattacaaactgaagcaaagaagtctgtaaatagggagaaactgaagatgcaagcacaacaaacaataataaattatccagacataccggaagaggccaaaagggaaggcacaggtataaacatgggtcagcatctttaccttgaggacacaggaaaaggaaaggaggggcatggacactcactttgaggacaaagtagaaataaaggcttattgcatattcacattgcatatgcatattcttctcatatagaaagaattttttagtgtagatatgatttagtaaaacatttgctgtttataagaggcattaatcacaagattgttttcaggccaatagatacacctactactttcttccctcatgaacagcgagcccaacttaggtaaaagtagagagaaatatagaagtagaggaagtcaaactaaacgatggtgaaaggggcaggccttgggataagaaaaagtctattattgcaatttcagtttaatttcagttttgctaggtttttcaagctgctggggaaaatgtgggcatttcattttatcccttttatctaagactcctttcctttgtaaattaccagtggtatcttacaagagcatttctgttatcagacatttgtctgaattcatttattttgtttcacaaattcattttgtcagaacacagttctaactccttggaaaactttgttttattggtataatataaatgaggtcagggtaaaatattgtcaaaattaaattgttcttatctttattgcttttggcaactttcacgttttatgtctctgtgcacattctgtaaactgtcatttattttttctcaaatggtataaaatttctgaagcatgctaattatgtatcgtttccaagcgaggaaatgccaagggactggcttaccatatgaagagtcctgcctgtgttttatcagtaagtccttgtggttatggtgatacatttttgtatactctactggtaacttactatgggcttaaaaacctttttcactgggagcttatgcaagtgaatgtggtgtgtttctttgcagctgttgccatagaaataaagaccttttcaaagtaaaatgaggatggcataagaattacaaattcaaaagaagttacgcttctaatttaatatcaaaaatggtgcactattccctttctttttaattttgtcaaaattgcatgacctgagtgcgtctaatatacttttattagataatttctagtatcagaaaagctaaagccgaaaaaatggaatagatgaattccccacagcattcagtaggatgggctttaatctttaatcttttattcttaagacttataatatttctaattgtcttctgcatgctctacctccatactactttctatcttattttccatttaaatctaattacctataatgggctttcttaaaaacaaaccatttattttgctttctttctttaccacatcattttcaacaacaaggcacattttctagcattaacacacacagaaggatgaacaaatctataaaactttctcagattttattactgttcatgttcagactttgaaagccttgtagacttcttttgaaaatgaaaaaaaaacctgaagcagttacacaaattaaagtttataccagaatgtaaatcaacacacagctcccttcattgagaaattcttgctaaaaagaaatgtcagcagacctaaacaataggcttaatgacatggcaaaaattgtgaatttgtaaagattaatatgttaatttggagattattttattttgagataatgtggaaaatgaccatgcatgctgaggtatgatggttattgaggagaaaaattttatcaaaaatattaggattatagaattaattcattgtttctgcaagttaagaaaccagtttattcttacttttttaaaaataaaatttgaatagttttatagacttgcttatttgtctgttatcatcagtattttaaataatgtcaatatttctatgcaaagaaagaatgtaatgtgttttttaatggtaggaaaaaataaaagagtgaacactgaagtttctagagattgttacaatattattctcatagctttacaacagttatcaaagaaacaagtgatgttcttgatattctacatcagtgaaaagttatcttcaaatatttaacaagtttgataaaacatttcaaattttattttccaccaaaagaagatgcatatataggaattctagaatgttgaatttatttatttcattgagaggttgtttaactttaataaataatttatagggtgatttgctttaactgactactgatgaagaattgaagattaattttcaaaatacagcatcacttgctccatttttaaataaaagttgtaaataatattctgagagtctaaaattacttcaaaatttcttcttccatttccttcaaaatatctttgttaaaatgatttctatcttaatgtcattaaaacaaaataatgaagcacttttttaattaattaattaatttctgagacagagtctcactctgtcttccccaggctggagtgcagtggtgcgatcttggctcactgcaacctccacctcccgggttcaagcgattctcctgtctcagcctcccaagtagctgggactagaggtgtgtgccaccacacctggctaattttgtatttttagtagagacgggtttcaccatgttggcctggccggtctcgaactcctgacctcaggtgatccatctgccttggcctcccaaagtgctgggattacaggtgtgagccaccacgcccagccaatgaagcacttagataaaagttatcctctaaaacaatgatccccaaccttttttggcaccagggatgggttttctggaagatttttcaaggactggggttgaagatagggtttcagggtgaaactgttccacctcaatcatcaggtctagtttgattctcataaggagcgtgtagcctagattcttcgccatgagtggttcacaatagggttcatactcctatgagaatctaatgcccccactgatgtgacaggaggcagagttcatgcggtaatgctggcccgccactcacctcctgctgtgcagcccggttcctaacagtccacagaccggtaccagcctggggcctgggggttggggacccctgccctataagaaatgtcaattcaacttgaagtagatatgttaacaagcaaaaagcaggatcatgtcttacattaaaaactatataatagtgtttatttcttcaaagagtgcatataggtactttgtatgggaaatcactatttcactcatgattttttgtttcattgtaattacaaaatgataaaaagttaatgagtgccatagggaatctttatgtgccttatacacactttaaataaagtgtacagttttgtaatttttttcatttttccctaatttttaaaaattttatttttaaggcataattttttgtttgttgaattcagtaatatacactggaatttatacttcatatgtgtttatttcatttttttctagcaattcagctttgttatgttttataaaagtactgattcatgacagattggatattttaaaaaccagtcctttcccatagaattagagaagtgctgatttagtaggttgcattgattataggctaaaactgaaacaacaaaaactttatcaccagcagaaggaattcattttactgaagtatgattagttaagctttttaaaacagtttagccttgtaataattaagagaaatgtgcacttagccaggtcaattctgaaaattaaccagcaaaatatacaatgaattctcagctatgcaacatatgttaccaggacttagaacccaggcagccatattctatataaagcaaggataacatgtttcactgtctgttctgttttattcctggctacctggactagttctgctggagtccatatgcagggcaagacaaccagtagggctaaaactgattatataaatagaatttctgaaaaagtattataagaggaaagagcagtttcctccctcaactctttcaaccttttttccccccggaaaaaagataaaatgaagttaatggacaatttgtgaagaatagtccaacttacctttttaaaattggaagatcccttttacacaaagatttaaacagataatctattatatgaccacttatagctaaaacaccctcaagtttaacaaaaaggacagttatttgatagatttaggtatgtggacagccaaacaagcagaaaccatttaagataagataatccaggtaacggttggtgaagataactaactttaggatcgagtttagacttaatgttgactggcacgaggatgctgagatttaaagaagttaatatgacttgttcagagtcacaaagccagaaattggtagtcatgttcaagtctatggccgaattctgctccctcaatagccatatttttcaacccatgagttgtgatccatgagcaagtcagaaatcaacttagtgggtgacaatcagattttctttgaaatattaacaaatggccagaatacaatagaatatacaaaatggtttaaccaatgtagaggaaaatcagtgtcgtcagagagaagcctgatactgacacagaagtttctctgcctattttcctctgctcagcccgttttctgtctggaggctgccttgattcattcccctactaatcactttgattttccttctcttccagatgtacagcttgtgcagatgaatattaggtggtgggtagagatgctccctctgctgtagagtggctttggtgaagccaaccaacccacagaccttacctctataaggagggctgtttgttgtttgattagtttatgcctctgatgtatatctggttccttgaaatttttattaataaaatgtaaccctctgtataacctcaccaaagtaaaatctcaaaaggcattaattctggagtcttgcaaactcctgggtgagccctgcctgtgtgacccagggaatactacttagcctctctgagtctcagttcttcagttatacaaccgaaataatactaatggtacctaacccgaagttgatgattagaaaaatatatgtgtaaagtagccaatacagggcctatcacatgctaggtattcaataattgctaattattatatcatagttataatattaatttctaagtatttgaacataataaaatcctctagcactaaaaccatggaaaagatttagtgtttcttttggaatccgaagacttttctggatttgttgctagcacagttgcccaggaagaagtgtgactagccagtgggtgtttgggggtgaaatccagcctgtgccctgctaactactaacactgtacctcagtgtagagctgcagctaatagggaaagcactgtatctgctaaatggagctctgtctcctgagtcattaagccagttagcactgtcctacagaagcttggaagtgccagttagtagacttttccatttagtaaagtgctgaataaataaacttttactacaactggtttctttaaagtgtttgtacttctaatgatattctagaacagttttgaatttttttctctttgtcatcacatagatgcttgtaaaaccagccgaatatcaggaataaactatttataacataggttgacatggtactatttgaaatgttttgtggactgcagatgtttcataaggattctttattctttttccttccattccttgatgttatggaatatgtcagaaggcttttttaaggtcaccatatatctaacctcttgaaaacgtatactcttatttcaaagctctaagaaactggtacctggatcactagacccaaatttaacttcagcttgctcagtttacatcttaaactccatttaaaaattgttattgtgctattagagaaaagtcccatatgatacccaatttgtattttgaaattcagctggataaattgaaatgctgaaagtgagttatgctattgcaacactcaccatatattaataactgaactgatatttgcgggataaggtttttctatcagagaaaaataaaatgatgttaaactgctagattccttggatggttagttcttttctggggtgaaagacttgagcaacactagaccccagtatacacaacctcaaaaactaattgaggctttgccctataatataataaatggccctatacttttcgtatttctatattttactactctagaaatatttccatttggaaatgttacctatccacaacagaattcagcattcacagcagttaaatataacaaactatacacacccctgccccacccccctgacacacacacaccaaggataaatcttaaaaacaataatattgaatacaagaaaaaatacataagtacatatatttcttttttaagagtacatgaaacagaaagataatgtaaactcgtgagagtagttatcccaagaggaaggtgagggaaaaaggactacagatggtcaaaaagtatttccatttaatctatgatattttgttgattaaaaaattcttgaagaaaatatctcaaactgttactagttgttaatgctgtgctgtgggaaaataatcatttgttatgttactctttttacatatctgcattttaaaactatctcaacaaaataatttcaaattttttacaaaggttttatctcatgttatctacagcaaaaacaaaaataaaaacaaaaacatcaccagatcttaaagaactttcaaggcataattagtttcatggttttgatgtcgatgctcatctcaaagtatagtaatgaatgcgatcacactttttctcattagtacaaactcctcatttgtctagtacctttcaaaaagttacgtttacttccattttcattgttagctcagtccaaaaacaagaacaaatatttattgagcacctattgtttgccagaaactgctgtaggcagaggataaaccaatggacacaatagactgggaatcagcagactacagcccttgggccaaatctggtgtaccatgtgtttttttttaaataaagttttattggaacacattcatgcccatttgcttacatattgcctttgggtgcttacaatagcagagttgagtagttgtgacaaagactatatgtctcacaaagcctaaaatatttactttaaatatttcttacttttcacaggaaaagtttagtaacacctaaaatagtcaaaaacctctgccctcatggaacttacattctattatggagacagatggccacaaaataaataagttttagtgtggttgatggtgatacatgcaaccaagattaagaaagcagaggaaggggatatgcagtgttgtgtggaagtcagagaaagccttgctgccaagctgaccgtggagcaaagatctaaaatagatgagggccatgtgaaaagctgagggaagctctttctaggtaggggaagcagcaggtgcaaaggtctgaggcagaaatttcaaggaactttaggaggtcggtatggctagaatggtgaaggaagatgagaggaggtcagagagtccacacggaaaggcagagcacagccttgcaggtcattcattataaggagttcagcttttactctgagtaagggccctcatttgtctgttgtaaaatctagactgttcatttcatttagaaacagaggccaaagctatagatactgactccttaggtcaaatgctattcaagtctgaaaacttcaattctaacctcgccagcaatggtaaggatcgccacactgccagttcttaccagtgctaccaggggaagaaagcaagaaaactggtgactatatgttgccacaatttgaaaaacatttctgtgacacatctatcccataagttatccatgatgacacactagtgtcggcactagagagcacatgctatgtaaggttttatttcaggccagtaggttggcctcaataacattaaatttcaaactgaggatttggggtatatttttcttagatatttgccaagaatgtaattgatcactggctctacatctgaatgtgttcagccaccttctacgtgcccctaggcagtttaattcctctgggaatgcttgggaacttctgcacagaagaatgggtagacctttcacagagagttcattccgtggcagctaccatacctgccctccagaatttatagtctaatcatgaggaaaagatcatagaaagcccctttcaaatgtatatatttctcttaaatacctctcagatcttcatatattctagcccactatctttaggcaggtatgtttttattccttttttttccctaaggtagaaattgctcaggctgagagattatgtgactttttcagattcacttaattaataaatgaaagaggatgtactagtggtcaggtatctggcttctcatacaatgcacattttttttctatcctgttttttaagtcaatgatcaatttgtgtcataaatatatgagttagaatctgtatcacctcaatataatatacacccttctaaaatataaagcatgactatgggtaacaagtattgaaagtatgccaaaatagaaatattgctgctccaatcatccaaagccactatgtccacgtttaatgcagacttataattcttgaaaatactggtgaactactattctcttttgtggatctatttaaatagccttatttttttgtgcagaacaaaacttatattgaggaaagaagagaaatattctaataccagactatgagctcctcgagggcaagatctgtgtataatttttctctttactctccaacatccagcatataataaacacttaataaatatacaaatgcttatcattgatacaagactgtctttatttttcccattcatttgtgttcctaagtggcagttgatttctcattaaagtagtaaaaaatctgtaacttcgattgtttccaacattagctcctgtagttttagttattgttgatttttgaaagatttaaattaagggtctgtcttcaggagctcaaacatctaaatgaacgtatgaatattgccatgtaattttatgtttgaatcccatagacaagtgactggatttttctctttgcctctggagatcttgacatcaaatagatttcacctacatgtgttttctcttttgaatggatttaaatcatatttcttcaatttgactttttccaaataatcatctggtaaaaatactttattatgtgtaagaaaaagatcaatataactttacttaaatgtatagttttttctcagttgttggtttgtcagccatgatccaagataagggctttttttctttcattaacccctcaaggctctcatttgcaaagtcaatgggacagttaggcatgtattttttagggcatctttgtagctttgattctatattttaaaagatgcccaaactatggcattatttcccataagatctctaagttattggttgatcaaaatataaatgagacaataaactacatttgcatatttctgtggatgagtttaaacatccttgtttctcctgcaaggtctttcacttgagttaggccagccaactgacatattgctcattaatcatacatattaactggagtagttaatgcttcaaaatccaacttaccattctgtccacagggactggtttgtgttttctaaatgtgatgacatatgcttcagacactgctaattaggcctttcccttgaaaattcatcctgacatgtttcaagaacacttttctcccttgagtacaagttcattaaattattaatatccttttataagtcttgtaggactacttacacaatgcagctttctctgttttcaaaactatagtttataatgaaggatgaaatagatctcacttccttatactgtatatctttttttccagtcaaaaacaatgggctgggtaaatatcagagaataatagatactatattcagttacataaaatgttaatgtaagattaaaaatattttttagcctgggcaacatagagacacccatctctacaaaaaaattaacaatttgctaagtatggtggcacatacctgtagtcccagctacttgggaggctgaggcaggaggatacttaagcccacgaggttgaggctgctgtgagcaatgatcacaccactttacttcagcctgggtgacagagcaagactcttatctcaaaaaaaaaaaagatttgcacatggaaatggaaatggaaatgttatacggtcagctgtttgtatctgtgggttttacatccgtggattcaaccaaccatggattgaaaatatttgaaaagaaaatatggttacatcttactgaacatgtacagacatttttttggtcattattccccaaacattacaatataacaactatttacatggcattttcattgtacgtattataagtaatctaaagatgatttaatgtatatgagagggtgtgtgtagcttatatgcagattctataccattttatataagatacttgaatggctatgaattttggtattggacagtggggatctggaacaaatctcccacagataccaagagatgactgtacatataatcgactctacacacctgtaaggaagtgttataagcaatctaaaacagataacctaaaattagttctattgagcttctgtattaaatgatgaatttggtggcaattttaccttctggcctattatctacctaagcaggtgcttataccaacctatataatatgacctttttaagacgaaactcctaacggcttcacatcacaatcacagtaatgaaactcagagcactcaccataatctacaaggcccagcctaatctggcctgcctgccacccaaccacacacttgctcttctctagcaacctgtgtttctttctattccttgaagaatttgttcttgctgttccctctactggacagctttccctggatgcacctggatgctctttctcagaccttgcatgatccttggactcactttgttcacatttctgctgagggcttccctgatttttctatctaaaacagcacaccttcctgtataactctgtactgccttaccctgctttatttttctgtatttcctatcactatccaaaattcgtatctttatttatttagttcttagagatgcaataagtatagcctagtggtaatggtcagagatgatacagccaagttgcctggattcgagtcttaactctggtgtttactggccccataaccttgggcaagttatgttgtcactaatttgcctcacccttaaaatgggaatacctcaaatatattttgaggattaaatgaataaatatgtgtaagtttctttgaatgatatttggcatctattactattattgtccccactggtatataagctctattgagacagaattcaaggtatttccagagcatggtaaagcatctaacccacaatagggacttcgtaaatacttcttaaattaatttatgaacaattctgggcacatgccagctgaaagtggggaaaatatcttataaaaacacagcgaaaagccagcaggtgaacaaataaagagtttaaaagtcataatggaaattttatgtagttgagaaagctgagttggttatgtgagttttgtaaatgtaaatgcatatgtactagatgtagcaagaatgaggggaacaagatgtatttagggtttctgcctttaggatacttccctagaggtgaacagagaaaaagtcaaagaacataaaaagaatctggcgactgaccaacaattgctgccggcaggaccaactgggtcaccagctttcccaggaaaccctaaccttactttgggaaatgttggatctgatgggagctgagggaaggtaaattgtaaagcacagacttcaaattacttttacccagttacagcttcaggtgacattggatgttaagtttaaggaagcgaaaagtagtattcaaataaagaaaaatactctcggttttgtacaatagtatgtcccaagtgttcagtttttaaaggtcatcgatacattttccaaatatttaaatcaatcatgcaagaaaaagaagtggtgagctgggaaatgccgtctgaacacacttgatctaaagcctggggataagtatcagaagagaagagaaccgaagagcgcacacacgtctaagacaggttaccgcaggtgcatccagggaaagctgtccctgtttgaggacttttcaggggatataatgtcccaggttgttgctgaggttatgtaaatgactttttctacccacattttcctcctatccccatgatccctccactccagagggaaactggagtgctgaggtcatctataaccaaatgaacaagtctgtctaaatgcctgttgcaaataattgtcccttctcttccaccatgaaggcaagctctaggtcttaatcatcttaatatattttccccaacacagcaggtaaaacagacagtaaatttctgccaaataaaacttactcacatctttttgatagggtttttttctgaaatcagcacttaagtatcaaaatgcaatttaatccattaaattcacttcaattaatagagaattacataaggaaaatttttccatttcaaaattgggtgacctttatagttccacctcactgatcctctagagttctcttcatttgtcagacagttattgaatgactgcaaaatgtagttctgtgaacttattttgtactagtcaattcaatcctggacactgaatatgtagctctaaaattctaccccttgagtatatcttttagattatgtaactcagaaatactgaaactatgtcctgtcactttaccttaattgaaatcaagatatccaaatattactaatgattatttgttccaatgctcactggtgatgctgagcttgttcctgtttcacgggcttagcctctgacctgtctgaagtttgtagatgaacttcactacactgtttttattttaacatttctattaaataagacttatcattttatatgcattatttgtccctctgcatgtcaattttgttgactctaaacctacaaacataacagttcccataataaaagtgaaggagaaaagtcttcattcatgaggcattgtgaaagtggaatgttttagagatgtggaagcctggcagcataattctcagacaggaaggcaatgtatataaaggccaaattccccttctccagtatgggagtgtgctgcctgtgaacatccaaatatggaggaaagaacgttttcacaatgagctttcagcttccaccagcttcatgtggcaccaagatgttaaaatacatcacagtatattcaggaaattgtttagccataccctaccactgccccatccatgatactagaccaatgaagtggcttggcaaatattggcaatgacaggcctagaaaacagagccagaagttgggccttagagagttggtggtgtggcaaggcagttaggcattccaacaaatctaaatggaaggtttgggttggcctcagaatcagggtagagagacgtgagggcaagcagaaatcaggcaagcagaggagaactaggaagatccacgttccaaagggaaaagcagcaagtaaatgggacatttacaaaatctgacttggtagtgagaagaagagaagctcaaaaattataacagcaaaataacctaaattgtgaatgatcgggatactcacatcaaggaaacgttaatcctgttttaatgttttaatgaatcatttattcagattatcatttattgaactgtagctcaagaggtttagataatgatgtcacaacttctaacttgttttgaaaagccacattagttacagatagagtccatctaaggggggataaaaggaaaggggcagagagatgagtaaatactggaatgaagtaatttaaaaatgttaagatcccagcctcaataatgttcatctttccttagctctgaacctatttcaagtcatttgttcatgctgaattgcattttcttctcatgtccttacgagagtcacttgtcagatccctgaagtaatgagacctttatgactagtgttgttactgtcatagatacattttaaaatatctattaagaaataaaatgtacttaacatattatgtcttcctcagtaagtattccattctcatttttacacatatcattgagttcaaaatgtaattctttacatcaggcataaatcttatttcctttcatgaagttaaaaaagaaaactaaacttcccagatagtctgtaatgttttcctgtgtaattaacacctcattcacagttgtgtgtgccagtcaaggccctgtctcctctttcctaacatttccttaataccttgttcaggctgagctgatgcctaacagtgtgcaaaatacacatatggaaacaggggaatgttagagagaagtcagctgaattaccgtgacctgccagtttaaagagagtacttagacacaggtttcattttgtgggtttggggtctgtgtgccatcccttaagtccaattactgctgtaacctcatcttcttcatcatcatcctcatcaacaataaaaaccatctgtcaaatgaataccaatagtccattatttgcattcttctcttcttaatgcttctaagagggccaaatgtttataaatcaagtgtctaatttaagatacacgttctctgacactgcaagtcatcctggaagcattaggttatttttactgttgaaaatttgtagatgtcattgatttaaatagccttgtatctttttttcttgctgttaatagtgaccctctgtgtccttgtgcacagaaaatgcaagtggaatcaagctttagatcattcaaataaaatcattccattgtgggaatctcctggcttcatttttaaaagttatattgaaatttaacatacattaagaaaaatgtgaatgtcataagggtacagcttgatgcttttttataaaatggacatacttatgcaaccaccacatagtccaagcaacagaacatcatcaccccaagaaactcctctcatgctttctttcagtcactttccactctcacatgggtaacccgttataacttctaataggatagattaggtttgcccattttgttctttgtatgatttgatcaacattatgtttatgagaaacatttatattgttgcatgtagttcaatttcattcattttcattgctatcaaatatatacttttccattgtatgaataaaccacattttttttatttctacctctaatgggtatcttgattgttattttagattttttaaaaaactcatatccacagttaaaaggtgattacacttttctaaaggatgcacactacatattttggaggttttcctagagacattatctaacatttttatataaaaatggagaattggagagagggtagtagaagggcaatgaggaaaggaactaatatttattagaactaccatgtactggacattttggtaaaaatagttgttttcttttgaattgtggtaaaaaatatataacataaaatgtaccatccttaccacttttaagtatacacttcagtagtgtcaagtatattcacattgttgtgaaacagatctccagaacattttcattgtgcaaaactgaaactctataaacattaaacaactccttttttttcctcttccttttcttcagtcactggtaacccccattctattttctgtcctatgaatttggcttctttagatacttcatataaatggaatcatagagtatttggttttctgtgactggtttatttcacttagtataatgtcctcaaggttcctccatgttgttgcatgtgacaggattttcttcccttttaaggctgaaaatattccattgtatgtttgtacaacattttatttatccattcatccattggttgacatttgggttagttccacctcttgtctattgagaataatactgctatgaacatgggtatgcaaatatcttttcttaaaactgtttccaattgttggagtatataaccagaaatgggattgctagatcatacggtaactctatttttttttttttttgagagagggtctcactctgtcacccaggcatgagtgcagtggtgccttctcagcttactgcgccctccacctcctgggctggagtgatcctcccacctcagcctcctcagtagttgggactacaggcatatgccatatgccaccatgcccagctaatttttgtatttttttttttttagaaacggggttttgccatggtgcccaggctggtctcaaacttctggcctcaggcaatccaccctcctcggcctcccaaagtgctaggattacaattttacaatcccatcaaccttgcacaagtgttccaatttctccatgtcctcaccaacacttgttttcagatttgttgatagtagccatcctactgggtgtatgcagtaggaattttaccagtgatctttttattcctttaacaaagttgttgcaaagtataagtaccattttacatcaatgaaatcttagcacaaaaggattctataagagaaaaaatggggcacagggattttccagtccaggtgctcttgaacttgacaatgagcattttattctcaaagttccacataatcacaaaacaaattgaattcttttgttctgagctgcaagatataaggtgctctacaggattgcctgactttaaatatgaaataacagctttagttttagagtagtggttctcataacatggtccccagaccagcagcatcagcattactgcaaacttggtagaaatgcagattctcagatctcaccccagacctactgaatccagaactctgaacagccaagcaggtggcacacacctgtaatcccagctactcagaagaggggctagctctattaccgtgacctgacagtttagagaaagtacttaaatacatgtttcatttgtgggtttggggtctgcatatcatcctttaagtccaattactgctctaacttcatcatcatcatcctcatcaacaacaaaaaccatctgtcaaataagtaccaatagtctattatttgtattcttccctttttagtactcctaagagggccaggtgtttataaatcaaaagtctaatttaagataaatgttctctcacactgcaagtcatcctggaagcatcaagttaaaaaaaagagctttttaaagctattttttattgagacaggatccatgctggtcttgaactcctgggctcaaatgatcctcctgaggtttcctatgactgatttattttacttagtataatgtccttgaggttcatccatgctgttgcatgggccaggattgtcttcctttttaaggctgaaaatattccactgtatgtttgtaccacattttgtttatccattcatccattcatggacatttgggttacttccacttcttgatcctgaggaggattgtttgagaccagcatggatcctgtctcaaaaaaaaaaaaattctgcgagtgaggctcagcaatctattttaaaacagccctccaggtgacactcatgcatgctcaggtttgagccctcctgggtttagatcattaggcagatatctaaattattgtctaataatctccacactgttgccaaacagaaaactgacatattgagcactttcaggtttccagggcaacttaatagagtaaatctgtgttttgctctttataccacagttttcaggaaaatgttggattagcccagttataataatgctggaacactagatctctatccatctgaaagttcacccaaacactaatttatcagagttgcttctgaacaaatggccacctgagaatagccaccctaaccaggaagacttattccggctcagcagatatctgacttatctccaggattttcactccacccacacccaagtccccaccttttgtctcacttttgggtctagagagagccttgtaatgaatggaccaaaacagccagagatagaagtgaaagcaaacatgcaaacattcctcccattggcatcaggagccttcttcctgtacctactaccaaccgccgcaggccctggccccagctatcctcaaccacttccccagagccctgcaaagaaaataacaaagattcacagattagactttcctctgaaaagtgggggaatctgattttagtcctaggaagggagttgtggtttatgccttttttcttggcctaattattaataaaatactcccccaaagtatcctagcttaaggagtaaaattcaccctaccaaaaatctacagttagctccttttttaaaaaacagaacatttattgtgtgactaatcattgaaattcttaagataaactggatgctacaacagctgccctcttgggtttagatgttgttccttctcagaatccacgcctgaatctgcggtatacaatattcaggtgcctcattcgaccagtcctggtattatttcatctttaagccttggcacttcagttatacttcctcttgcacttagcagggtagccacatttgccacaggatgacttctgaaggtggcaggccttagagccacagtggtggcacaatgtgtgcgtcttactgcaacacttttcaaacgatggcgttcccttcagtatcttgcttctgtggccaagaccaaagagtgttgttagctcttaggtaggcttttgcctttccctaatgcttttaagtagaagatagatgatccttcagaggaacaggagacagtgcggctgtattcggtgcagcttggggccttgaaggagggaaacaagacaagggagttaattcctaggggtccttggagagaagaacaatgatgtctgggagtaggcatggactattgtgttgatagaaattgcagcccctaagaaaggtgccatggctcacacctgtaatcccaacactttgggaggaggccagagccggagaatcacttcagtccaggagttcgagaccagcctgggcaacatagtgagaccctgtctctaaaaaaaaaaaaaaaaaaaaaaaaaattgagaaaaaaagagattgtgccctgcctggacccatagctctgttatgctctaaagcttccacccacatttctcatccatccacccctctcctctatcctccacaagtcactgatacttgagacttaagtctcaagagtttttcctaaggtgaatcttgtttctagtacagattgagcatccctaatctgaaaattcgaaatctgaaatgctccaaaatccaaaactttttgagcaacaacatggcaccacaagtggaaaattctacacctgacctcacatgacaggttgcagccaaaacacagtcacaattttgttttatgcacaaaattatttaaaatagtgcataaaattactttcagactatgtggataaggtatatatgaaacataaatgaattttatgtttagacttggggcccatccccaagatatatcattatgtatatgcaaatattccaaaacaaaaaaaaaattacaaaacacttctggttccaagcactttgggacagatgataatcaacctgtatgtatttggtggtaagcctaacaaaaaggtaactgcactgctttgtatagcacatctttaaaaattgttcaaatctgatttaaggtgctaatagaaattcaagcctagaaactacatttaatgtgaaaatatgtgctggccaaagttgtgtgcacacaatatgttccaattacttagcaacccccaaaaatattttacctgcatgtccactcggcaaaatcagccttctctctgccctcttccagcatgcacactgacactctgacactctgacaatggcaaggctggctgaaatcagcagtgaagtgcaggaatctggatgcttgccctcaccatatcctgaatcttggatgctttttactcctcatcttaacacatgccaatgttatgttacaatatctgacatttggtttgtttcaacattaactctgcgataaaagttaatcaacagtcagcttcattttccccgcttcctgcccaaatcaatatacatgactcctttgaagaaaggggaatgtaaactaaagttgatcctatggttttaacttacctcaacctaatgtatgcttaaggaaagaaccaatcacttacctagataccattgatttagtttctttgtgttgttgtgaattaataaattacagtgtttccactttctaagtaaactttttatcattgattagtcctcagaggcgaatttacttatatttactaaaagaccaaatatactgattttcagaaaatgtaaactgcaagactagaacatggtgtacatgtgtataacttgttttaagtatagagaatattaaattatatgttcatttcaatcttacaatcctccaaaagaactgcatggtttagatctataaaatgaaagataagagaaaacactactattaataattatatttgtgtttttaattttttttttttttttttttgagacagagtctctgtctcccaggctggagtgcaattctcccgtgttcaagcaattctgcctccagagtggctgggattacaggcacataccaccatgcctggctaattttttttgtatttttagtagaaatgaggtttctccatgttggcctgacctcaggtgatccgcctgcctcggcctcccaaagtgctgggattacagttgtgagccaccatgcctagcctatgtttttaatttttaaaaaattttaaatctgttctgtagatgttaactagggctatttatagaaaaggctgctgttttcatataaagtctttgatggtatcacctaatttcccttcaggaacaatggacacatttctcatccaatcccagcattgtatttgcttgtttatctctgaaaacttactctactgtttcaactggcatttagacctcctaccccacttcaagactagatgaaaatcagaggaatcaggcaactttgcctgacattttcagagcaagaaaattggtgaataaaatgggcctttctgtgcctacacttataattctcccccaaaaaagcattgaaaagatcaacctaatatctttactttataagtatcaataaggcttaatatgtacagacagtttaccaatgtgataatcaaatagaattgttagtaacaatgaaatagagtgaccatatttagaaaacatatgctcataaatgcttctcattcaaaatgtatgctttcaatacctaagctcacttccctcttttaaaaatttaaaaaataaaaaatgtttaagaaaataattttataataaataatgaaatgctttttaaatgttattagattcacgggtacttagagaggttagcacaacatcttgcgattggaatttagctagttgtgaacttgggagagttaatatttggttgtaatcatgaagattaacatgcaagaattatacattttacttcacttataaaaacagcttaaccatctaaagggaagaaaagagctaatgtgcttcattcagtatatgtaattacaatagggcttagggcagtgctttccaaattttagtgagcataaaaattatctgaagtagttttaaaaatgcagattcgtggctccgacccccgggattctaaaccgtgaattctaggatgaagtccaggaatatgcatgtttaacacccaaactcaccctcaaataactcatacaaaattagaattcagacccctcttggacaacaccaacataagatgacagatgtacttgttattgcatccgaaaccacagaatcatcagataaaatacccatcttagaccatctttcatatactttatattactttgctaaagaaccaaggtagatagcatttaaagggctgctgataaaagttaaggtttattcatttcaggtactatacttctcattatggtccttaaaaattggcccacagcttttaaaattgatatttaaaagtcatgtggaattggaattgtttcttaactttctgttcatttttactgtcttcaatattcccatttaatattgtttgatattaaaatataatggagtcacagtatttatcatctattcttctttggtttcaagggaagacgagggaaaacaggacctcccggaaaaccaggacccccaggaccacctgtgagtaagcaatacaatgactgtccctttaaagagtctgtctttatgtctgtgtgtttacctaaggattattttactcccctgtagataatgatttcctttattctactgtttagaatgactggtttcagcatttggatgagtagttcatactctctatattcctaactccatcatcaccacaaaccaagagatgagggaggctggtaattgtccatacacctcacccacttctttattacacaaatggcaataacagtagtgtctgcttgaacatcccaagccaagtgtccagatagatgaatcctgttctgaacctacctgaacaccatcttctagatttcttaacatccaggctgttagaaaatcagacatctggggaagcatatccacttttcttgatatgaaactattttgttagtataatttcatgatttggtaaaaagtgctataaagatcatctaaccagttagcttatctggatcctttaccccaagcttctagaaaaaaaaaatattcaatttcttgtagttctggtaactctgcagcctatgagagtctggtttgtgtccaagctgctccactgacactgcactctctgtggtcaccaacaatctctgcattgcagattccctgagcacttttcaggcttcttcttactttactgctacacagaaatgtatactattgactgctctctccttgaaactccctattctgttggtttagcaacattgggtttttttctcctatgcctggggccatctttttgtctccattaacagcttttcttctaccccctacatgttggatggattaatgaatgccagttttttatttcaacccagacattgttgctgagtcccaggctggtacattcctttattttttagtatctccacttggaagtctcctagctaccacaaaagtataatgtccaaaactaatctctaaaaataatcctagatttttttgttcttcatcctcttcatctaaacagtctctaaatcatatcagttctacatcccagtagcccacaaatcctctccgtcttcactgtcaacggccttagtttagacctctgtcaatttgaacctatatttttgaagtcatctgagagctggtctcattgcctctaccttctccaagtggagcaaaacctctaaatcatgacagcatctaggtgggcttggatggcttaaaattctctaaaagcttaaaactatttgattttaaattcctcaatcgcttcttttttcttcaagaaagatggattccacatcctctacatgccattctgggcccttcatggtttgccttttacctgccttggcctatcctcctctatgcccttccttcttttgtaatcagtaatcttcgcttactatttcaaaaatgccatcacttgcaaatgttctccagtaggcctatatatgcttctctctatcttcatgactcagctcaaacatttctcctatagaagctttgccagtgctctcagcatttgaggtttcctcccatggtcctgtatcttacacctcggacagacacggcatgttactttggactcttattttcctcatctgtctgaccactgcactgtgacttttttgaacctctattttctcaccattgcttagaacagtctctagcctatagcatgtgattattgtttatttaatgactgagtaacaaatgaatatattttgtagacgaaaaaattaaaaccaggtaagtgacctaaagaccaaaaacaccctgcaccaccactagagggcctcaacccagtaccctaggaatctcttaggatgtgctcacctgccaaaaatgaacatgattgctgtcctgtcattgatttcatttcactttagccattctagtggattgtcctattaacaatgcattggtgccaattgatatttgttatataaaagcacattgggggaatgagggggtgaggaagcatgagctgggtgtctgcattagtccattctcatactgctatgaagaactacctgagactgggtaacttataaagaaaagaggcttaattgactcacagttccacaggttgttcaggaggcatggctgggaaggtctcaggaaacttacagtcatggcagaagggagaaggggaagcaagcacatcttcacatggcagcaggaaagagcgagtgtgaagcgggaagtgcacttttaagcaacctaatctcgtgagaactcactcacaagacagcactagggggatagtgctaaaccattagaaaccaccctcttgacccaatcacctcccaccaggttcctcccccagcactgaagactacaatttaacatgagatttggttggggacgcagagccaaaccatatcagtatgctagaatctagtcttttaaaggcatcagttttgttgatttttatttcaaagttttaggcaaaacagagaacacattgtaagatctttaaaataattgtttcatgctttaaagaagaaaagctggtgaatgctaacaggcaagattagaccttcgtgtagttttctaaacctatgatgctgcttttaagacaggctaattgttgtctcaaaggaggaatttgaatgttgaaggcctttatgacaagcttgccaaatgtgtaggagagaagaggattacaccgaattctggaatgagttctcaactatagatcaaatgagtttactgaagaattcagaagattaaaaaacatgtgactgtatgataggatttataatattcaattccgcagactttagtttgttgccagagtgtttgggggagagaggtgcttatttttatttcaaatatagatttagaacttaaactcagctatgggtctgacacacagtgttcattaaatcctgggaacataatatttgaaaaaaatggtttattaactttttaaatataataaaatacccaatttgttagaaaaattaggaaaaaatctatgcagaagacaaagtgtttactttggtggcatgatctcggctcactgcaccctctgcctcccagattcaagcaattctccagcctcagcctcccgagtagctgggactacagctgcgcaccaccacgcccagccaatttttgtatttttagtagagacagggttttaccatgttggccaggatggtctcgatctcttgacctcgtgatccactcgcctcagcctcccaaagtgctgggattacaggtgtgagccaccgtgcctggccagtattcactatttttaaagtatcagcagagcacttgttatctcttaggatttcccagggagctatttgtattttattacaatttacaaatagcttaagagatgttcccccttaattgtggacatttttagatcaaaacattattgtttttcatttatatttcttttccaacattgaaccctttatgacatgcatcttactttatagcaagaaggaagtcaagaagagaacaagagacgggttggtaggatctacagtttttctaattgttactggagttagtatatacctcgccccagtggccagtatgtgagaatcctgaagcatgtgttagaatatcttacgaaaatgtgaaatgtattttttaaaaaattttaattttgtctcttgtcaaacagtaattaaatactatgtaatatccctcaaataagtgaatattttatatcatttaaacattatgtttgagcaattagtctttaggaaagttggagggagactttattctagtcagcatgattgtctgcaaagaacaaaggaataggaattaccaggaggcatgatttttttatttttttaataacagcatactttataagaaaatgttcttccctttgggggtttaagatgtttctgaaatcaaacatagtgttgttattcgggggagtgtcagtgaagactttaaaaatcttgaattgaagggactctaagtccccaatggcctgaagcaattcaaataaagtgttttaaccagtccttctacttgattatttgttctgaagccaaattagtatattctcagtttcttacaaaatgtttgtaccaaaaggacaacttgtttaccaaaataatttctgacaaatagctaagtgtgtgcgtgtgtgtgtgtgtgtgtgtgtgtgtgtgtgtgtaagaggacaacgttttgtcccctgagacattatatctcctagggaaaaaagatttctaataacggaaaatttactaacactagttttattaaactaacattattaaattatctttgtgaatcagtgtttcatggaaagtcatgtatatcactccaatttagcttaactattattcaatagcaactttttgtgtctttaggacttatttgaaatttatacacatgcaatatgcatataatgaaactattcttaatcagagtgcttgtcattgaacagtgactaacctggttaacagagctagctacaatgtatttttgtaaagtatttgtccaattccttgttaaaaaccagagctgatcttacctatacaaaggaaaaagctcccaaagtgtcccatgtaacttctgctatcttgtcctaagcgaatattcttcattggagggaaactattacatagagatctcttggatttatttcaatacataaagattacgactgagaacagtttttcagtatgagagggctaagcatctccctcgggaaggaaatagcactaactcctgaggaaacaggttcagaggaaagagggatgaagcagaccaggagaatgtattaccatcacgagctctgcattaagtactgtatttccagtgtcttagggaatccttacaactgtcttgaaaagtagaaattatcttcattttataatggggtaaatgatacttggaaatgtcaagtaacttacccaagatgacacaagcagtgaagacagaactgaaacacaggaactgatccctaaacctttattctgccagacttcaggtgtgaaagacaagcttctagtttacagttcaactaagattattcttcctcaaacatcatacctagaacaatgtttgagttttccgttgcaatcaatggcactatcctgactccagacagcgagatggtataggatagcataggatggcggtgaggaacttagtccttctcctcactagcttgtcctggaacaattttcttaatgtttccttgtctccattttcttttctgtaaatttgaaataatagcacctaccccacctactttttcccacagtggctacaagagcccaatgtcattgatatgaaagaactttcttctaaatgtaaagctctatctaaatgtatcttagttccactgttattattctgaacacccattcacactgtagagagaagagattgtcttcaatcagtaattaaaccaacacttcttttctctctttacagttctccaaaaatctagttaacagaaatttgaatgtctatcaatgaattgctgaaataaaagatcactttgcatatgtcacacttattctagatacgtcatgaagagatccaaaagttattcccaattaggtaacaataacaaccaggtctaaagagtcagtgatgttttttctcccgagatttacagcctcttccttgcttgtggggcttgttcctttaccatctgagctgttgcattttattagttgtgatgttctctaagtctcaactgtccttcctcacactccaataaaagcttgtcttttttaaaaaccttccagttatctgagtagcataagcagtggaaagtaatagacttatgttatgataatgagacttggaaagtctcaagacttggaatgcctttgtttatttcaaagtattctggttttcagttcctttagaaaagagaggaaagcagctggaaatgaggcggagcaggagagaaagtaggagaatttaactaatgagccattaaaggaagtaggtattagcccatccatttgacattaactttacttctcattcatcattactggaaaaagcgtttattaaaaaccacactaatttaaaattgtgttattatttcttctgctacaggcaagactttttattttctttctttttttcttctggtattgtttttatgcattgtttcattattgcagtatgagaattgagcagtgggctccatttgtcacatttgtgtgcatagcaatttcagttgaaaacagaaattcaaaaaattttgtaacatggggcaacagctccatctactgtttccataggaaaagctctagtcaaagaatgacaatagctctttgaaggatgtcagaggaatggaaatttttcgatgtttgaagcttataaatccatatgatttttaaaaaattattttcaggattttgttacatttatgcttaccttgaaatttaaatataagtgctatttcatcagcagtcattttcaatgtcaacttgatgctcttttgaggtaaaaatccatacctacttcatggatctctaaaatgcccttctattgtacaataccaataaaactctgcagcattaatttttgggagcttactccaacaaaacatatgcttcttttctaaaacaagtctgatttgaaacatgtacattcatgtttctattttaattttaacttcagtgtagaacttcttctacctttaaagcatgaatcattgcacagtcctgaaagttacaattatacatcagtttgcacaattaaaagagtaaatttagggtgtaaaatttaatttatttactaaacaaatacttatggcctatctactatgtgttaatcactattacaaacattgaatatacagtggttaaaaacacaaagcaacaacaaactacagataaggtctctacctttctttataacttactgtctgtggtgaggcagtacaccaatggttaataagcagttaaataaatagacaaaacaatttcggtttagagtgaggtgctatggggggaataaactgggtaatgtgataatgatttggaaggaggagatgttcttctcattaccatctaattgaggtggtccagggaggtgtctctgagcagaagacattccttgagaaggagctggccatgtaagggccagagcaagaactttccaaacagaaatatcaggacttgcaaagagcttcaggtggggaaaagcttgatgtattcaataaacataaaggagctaagaaaagaatagtgccagaaaagatttgggagctgaatggcttcatcatatagggccttataagaatggaaaagaagggttggggggcaagtggagagatacacgtagccatgaaataaccagttacatctccgttttgtaagtgtgtgtgtgtgtgtgtgtgtgtgtgtgtgtgtgtgtatctgcagcggtttgatttttttatgtgatgaaattactgttcctactgattcaaataaattattctgaaggtaatattgtttttagcccattatctttagtctttgagtggacggggaataggcttgtttgctgaaagaaaacaaaattgacaaaggtttgattgtagcccatttaatttcagtcttgtctgaatccactggatatcactttggtcattagagatggagaatttcatcacatctaagtcttttctttttccccacagctaaatctgatgtttcctttctgataggctataggttgagtcagttgaacagttggggcaatgaaaatacataccctcaaaacgccatagaactaagtgccttccggcacttgtgcccccttatccatcgctgttctcaacttgagtatcttccgtctccaactttatttactatgcactgaaaactgaaaggaaagttattattttcagcatatagcaggacccacctctaaaacaatttagtgtcccaaaacacatttttggactgctgaataaagcagatgacaaaaactgtctcagtgaaacatttgatcacttgttaaaataccctcagaataccttgaatgtgactacatgcattttgaagctcatcatgtatcaatgggaatccaattcaaattcttaacatcccttctagaagcttgaactgatcagggcttagtcatgttgctcagttttcctttcagcaagagaaccacaatctcttctgttaaatgactaaagtctgtgcaatgtaatatcttcagagaaaatgaacctaacaatttatttgagtcaatgggaataggaatttcatttcttaaaaaaaagtaagatgacactttctcagatttaaaaatatagacacataagacctataaaatggagacatggctagttaatcatgtttattgccacttgtccctcatgggggtaatggtcccagacaaaacagctgttcccaacattgctaaaattccagtgtcaccttgtgtgaccacagaatacatagacatgcatgtgaggcagctggggatatcaggttgagattttgaaaactggctctcaggttttattttctaattatttctctttttctctccctacggacagcagcagtaggacattattagtcactttctgacttcctgtgttttttactaatagtggtaacattatggtggaaaaaatattatatttgtacagccactgactgcttgtttcatcttgtattatgttcttgaaaccaactattaagacatctggactgacatgtgttatttacagcaacgatgagacagactatttgaaatccttgatctgtggtcaccaaacttgtaattagttgtgatggtgcctggattcaacatcatttctttgtgttgggtaaacattaagatttgagaagtcaaaggccagtcagatttattagaaccttaattttcagaacgggatatttgtttcctaaataatcttatagtttgcatttgatgatatagtttccaagaggatctccatactgtatgtaattttactgctgtatatctttgtgaggtaggcaagaaaagattattttcatttaataagaatattctaggtcctgatgaataaggagctcagctcaatttttgcagtcagttttctctgcacatcagtaactatagcttagtatgatcaaagtaaagactgaaggaaattatataactagagaagcaacaagttttcagcattgtctaggggacctaaaacatggaagaaaagttggcagaaaataagatttgaagggtcttcagctatgtctgtaatgaattcattaaaaagtagaaagacccaaagcaaatatcgcaaaattgttaatatttgacaacataggattttggactcattgcaatttatattattttctgtacttttcagcatgcttagaatagttcaaattcattttaagaagcaggaaaaacattctatgggattagtaacagttaatatcactgattacttcttcactggctgatatcatcagtatcttctcctttgactgaaatcctttgtggaatggggccacgtgttttaaaactaaaattattaactattttttagaactttcctgagcacactgtctataaccatggtgttcagctgagccaagaattgtcatttgtagatttatcattagcacaacctatagataagggagagaccttaacatcacacatttgagttgaaagtgaggaccacaatcacccaattattccagagctgcccagaatgtccccagctattcaaattgtgcacatgctcttggcctctatgtaacttggcagtgtataagctagtgccaccagcctggttatcttaagtcccagcagtgtgccttgaaacttgcattttcttaactcaggaagagttgtcattctaccaacacttttaaagagaatgaatgttatcacctaattacagtaaatggaaactcaaagcattcataggtgtgggctgcctgtggggtccatgtaagccatctttcctccagattttggtggcatattgaaaaattcctgaggtcaaacaaggggatggaggcacagttgttcctaaggtatggtttttgttggtggtgatcttttgaggacaccactggatacaaataatttgtttcacacattcccctccttgctagttttcatgcccctgtggcttttatcaccttgtactgggtcattgatgttgcatctgtgggtggcaaggcactctaaagattcctgctgctccttatattgcaggacactgacaaataatatttttcctttttcaggacatactggggagagatgagtatgaaacattttatggatggataagcagaatagcagcattaggggaggaatctttttttttctaactatcatgccatggagatcagtcaaaatgtcccactctatcaataaggcagtgggctttacaccaattaggttgatatctggggaaataagtacctttaaatatatttttttctgccttagaaaacaaagtgttaaaaaatctacaagcttcctagcataatttagaaaatctgcttttatgaaatgggttaattatgcccattgaatgcattcactgtcacagtctcatcctcccacttctgttccaaaatgacaagtgaaaccagggactgtgcaattttggaagacaatcagatcacatattgagtattttgcttattcatacaaccataaacggcctatgcttgagttccctcaattacacagctcagtatgcaggccagaagcagacaagcccagctcaagtgagcactttcctggaatacacgggggaacgagtttgaaaaatgtccaaagtggcagatgtgaaaaattctcattcaacatccagagctgcctttgctgcaatccttcacctgttaatcgcactgcctctgaacttgtgaaccagggatgctagcgatatcttagactgagacacttaggagctatagatctttcaaggtatggtgccagtatatgccaaggtgggggaaaagctagcgagacaagacaagatcatggatcacagcactgctcagaattttcagacattcaccaagaataagcatgtcgctgccagcttccaactaaactgttattatcttttgtaggggaaattcccaaaagatgtccttgataaatgcttaaaccattgtactgtatcacttaaattcttcagactcctgcaatgctaatacacaatctctcctccacaacagaatacaatggcactattgtagtcttaagtgaaggatatttcattttccctgagtgagacaactttcccacaactgttatccactgcaatttcatgctccttggagtttctgtgcaccaaaatcatccccaagcaatatactctcttgattagctagtattttattccacctcctttgactatatttattttttcttttcttccaccatcttataagcgcgaaggctccttgcccttcatttggcattattgaaacctcaaaagttatttaagatgctggttgagattgttaacttccttccttttccatctcagcctaactctgatctttctttctcctgctctctttctagtagaagccctccatgattttgaacttccttgtgtctctgtgttgttcctctctcttatccttacccctctcccattctggtcactttcctcttgactcttcttgtcatccaagtctttctttttttttttttttttttttttttggagatggagtcttgctctgtcactcaggctggagtgtagtggcgtgatctcagctaactgcaacctctgccttctgggttcaagcaattctcctgcctcagcttcccaagtagctgggactacaggtgcacgctaacatgccctgctaattttttgtattttagtagagacagagtttcaccatgttgcccaagctggtctcgaactcctgagctcaagcaatctgcccgtcttggcctcccaaagtgctagcattgtgggtgttagccactgtgcccagccctttcaaaaggcatgtctacaccaagtctcagaccattcttttcttggcccttagtgattgtatacctcattaatcctgtgatctttcaccacacgatgccctgctcgattgtttaaaaaccagctttaagatgattggtattttattttcccatcatccttctcactgtgaggtggtttaggggaaagagttaaaagatcaaggcagtggggtcagacagacctgagttgaaacctagctcttgtctactatttatatgaccttgagtcagatatttagtcttttgttatgtgtaaaataaggaaacaccacctcactgggctgctgtaagagctaaatgcaataatgcatgtacctcacacagttgtcactttcaaagggtaactattgttatttattaatatttttgttatcattatcctcatttaatcattatttgccatcttctcattatttttgtctttctttcccaggatttaggaactgacatttccaaagcaaaagggttgatattttttctcttttattatcacctgcatgtaaatttttcttctatctgcttggctcccctccttcctattttcctctgttaaagtctttatagagaaacttcatccatctaagaatgttggcctaaatatatgcatatacatattcatcatctggaaaaactcattagattctattttcaatgtgaacaaacacacttgaaaacatctcttttaaattgagagcatttaagtttcataactgtattcttttgtattgaccaatgaatgaaacaggtccatcagattagcactgaaacatgaattttccctgagcttatttccatttgagtccccaccacttacaatccaagttaacctgaagacttggctcacaagtcatttctcaaagcctctttccagaaagtgaaagccctcagcctaacggtggtggaggcagagatgcagtctgcagagtcctcagcctccctttcctacttggtactgtcttctcctgtccttagcccccaagggccatccctttattcttctcctttcctgtcctacccgccttgctcttgggaaatatgtaatgaacaattcacatgaatctattagaatggaatgattttggacttggttctaccattcatgtggtttggggaaaaatctcttggttttcccatctgttaaatggaaaatataatactacccacttcagttggttattataagaatcaaataagataatgcattttacagtcacattaccctaccacccaagaaaatataagtgaaaatacttttagaattatccagagctgtgaaaacatgaacctttagtattatatctcccaggaacatttgcatttgatctggcagtaaaacctaacatcaaaaaaaataagacttttgttaggacattttgggcataacctggagagcaggcaagatatttgaaggaaaaagacctcctcccaggaacctttaaatttcacctatatgtggcccatgttctctagggtgacccatttaatcccaagtatgagagcttgaggtctctatattgaaatgtaagaataatataaatactcactgaatctgctcttggctttaggaatcacattttatagttcaagagtttctagcagttgttgttttttttgttttgttttttggtgttttgtttttttttttttttttggtggggagaaggtgttggtatccctttagtcactaaaaattctcaacagaagcattctcagaaaaaaaatccattacaattataactgcttaatttatgtaattaaaccccaagagacactgaaaaaaatttcattttgagtaaatattaagacagagaaaaggatgtgtgtcttttttaaaaaaagaaattgagtcccccaatattttctatctaaagaacattattgattttttcccccagaattactttacaacttatatgttgtaattctggtccaaaaatccatccatgagctcttttctacttaactggagctcactataactatgctttcaattaactagccacattcttaggttaatctaaatctgttggtcttgtcttttataaatttggaagaagcaagccctttgctctgtttgataccatttctaactaaaaccaaaaccaacaaacaaaaaaatggctttctccacagactttttcttataaaagcaatgattctaccgaattcaacaaacattgggtgctggtgatgggagacagatactgcagactgtagtgtgctgagtttaaaaggatcaaaactccttgccctcacaaagtttttgttgcaactgggaatacaaacatgtacataagccactatactcaatgtaaatgtgctttactaagttatgtataatgtgttatagatggaaacataaatgagagaaaaactcatttgacattaccttttccaaccattattattttttcatctcaccattcctatgtctgaatttaggcttcctaatgactgtttttttttcttgaatacaaagggaaaaataattactgatctctacttttttacaagccattagaacactggaaatgtttcttgaaaattagtccaaaggactttccaacaagcattctatctgttcttacagaaaagcgattttttagcacttttgaagagagttggttagtacaacttccttcacagaggtttttggtatttcaaagattgttcttgaatttaactgaaaacccacagggccaaaagcagctgtgtgtaacctgaaaacatgtaattttgaatccagaaaaaagcttccaataggagattgaagagctatggtgcataagtggcatctggatggctcaaggagactcagtcaacagagatgaagaggtacagggtacttttagagaaaagggagaaaggaaaatagttcaagattgaggatcagagagtgagcaggcgatttgactaaggagccacagagctcctgattcacaatgtgcagagtgtgctaaagctggatcagaaggctcaagctctgacttgcacagacagcttatggcaaagaacagtgagggaaaaaaaggcaaaaatattgctctttaagctaagtataccgggtgaattggctaaaaagtgaaaatgcagctaagactaggactaaggactatggtttttaacagagaactcttcccaacttttaaactttgggaatgtgcagccaaaactgaaatctactaagggaatgataatgcaaatagctcatcatttttacactacgtgtctgacaagtccggtggcagacatcatggtatttctgttttccacctccagcaagatttaagccaaaaactatttaaaagctgctagaactattgctgagagtatatacttcccaaattgaatatagctttaattcactttatcacacctgctgtagttctttgcagtaagaaacgacatcaggatctctatccacaccaggtttataggcctctcagataattatgaatcagtacagttaggttcagaacagttgtttctccctggagttcattagcatattttagctgctctgtaattgtatactcaccacattaatccagatgtcctatatctcccaatcccatacaaatagagtgaagcaaatctccgtaaaaaacagacattgtataggcatgacttgtgtacaatcatgttgtgggtcactgttataagcaagatattgggacatttttcctttccataaacctttaaccacttttcctagcagagctcctaagagcataagccaaggctgacatgccctctgcagttggcctctcttcaccactggacctgggtcatctaagtgtcttttgatgggtccttgtaaatgcaaacctcagagaaagggttctgtcaactgccctagagcatctacaccaccatgtgatgccgagagatctgtcacttaccacaagtctttaacttctttcttggagttgattggtagtctgcaggatagacaactcttgctaaacttggcgacaactccttggatcttctccagccatatttcataccagaatagaagatagaaaaatagcacatctcttgggatgtggctggtaggatagccaccaattctgaaaccccaaggttgtgttccaactgtaaacagagttgcttttgcaatttaaatgcttatagcttattaatgaccactatctttgacagtgttagagcaaccaagtgagacactgcctcactgactatagtcagagtagagggggacttccagaagactctaattggcatctctttccagtctctgaagggttccttcggaccgctaggagagtttgtataaagtattgcctgcagggtagacggttggctgtaaatttctgtcacattaaacttgcaatttgtggtacccaaactatcccagtgactaaaaaagtgagaaagaaaatgtcatcataaatactcatgatgagattaagtggtagaacctaaaacttcagatcaaacccatttcgagtactactttgaagataagacattttgtgacaaaagcagaacatatgaaaatgtagaagtaatttttatgggtttattaatcttgtggatatttgaataataacgttcaaccttttctgtagcctcattgctcttggcattgtttttagtgagttgtttttagtagctggagggagcagtgcactgagccgtgcatattctcccaccccacccccagtggtaagctcagcagcagccagatcaggatcctgcatgagaagtatatactttgcttatgaaatacagctatcttctgtgtgcatatgaccagtctgtaaaggatcatatcccatttcacccaattttttacaaatcattatcattctattgttttttactgttctcacttacactgctacctgttttattctgtgcaaaccctacaacacatttgctttcttgcttcttttccttactgcctcccagaaccctttgggaggcttcacacttcttgtatctcagaccacctgctctcccaacctctacaaacaaagataggatacatttgaatacagtcacagactaggagaaatgttttgtaatattcagggataatctccctaacatgggttaagagactgtatgaacatagatgggagatacaaggagtagataaagaggcctctctcaactacacggtatgactacagctaaaggtaatgtgttcactttcccgcctcctgcaccaagcactgtgaagtacctggcagaagtgctacgtagaagttttgttgattttttttcaatttcagtaaagtaaatagaacatagaagagtgatcacccagtattctctagggtacacacatcatcatgataagaaaattactgcaaaagtgatttttggctgagtttgcctttaagttaagatagtagagtagacgagaactggctttgggcccaatgctaatgttaaatattagccctgccacttaccagtggtgtgaccttggaccagttaaacatttccaaccctcattttctttatctttgaatcagagagaatgatgggacattcctcctgtcattgtaaggactaaattagttaattcctgctgtaatgcctagcacataataagcactatataaatgtttgctattggccgggcccgctggctcacgcctgtaataccagcactttgggaagccaaggcaggtggatcacttgaggtcaggagttcaagaccagcctggccaacatggcgaaaccctacctctactaaaaatacaaaaattagccaggcatggtggcacatgcctgtagtcccagctactcaggagactaaggcacaagaatcccttgaacctgggaggcagaggttgcagtgagctgagatcgtgccactgcactccagcctgggtgacagagtgagactctgtctcaaaaaacaacaacaaaaagagtttgctattattatttgactgattctgctactctatttgggagactgtattattaatttttatgctatatttaagagttctaataattaagaccctctcttttaactagattgaatatgtatgaagttaaatttacctacttcatcactgttctttgatctaatcagccttgtcatcaacacacactcactgaatgcctactatacatatacccctaagccacctcttaatgctactacatatggtgtctaaaattcctccttgcctcattatatgtttgcagaaggatcaacatgtatggaacttcatgtctcctgactttcaagaataagatcttaacttgcatgttcttggctagatactttgtgtaacaacccccccactcaatgattgctttctttctttacttcctctaactgacctagaattctttacacaatgctggctgctgaaaagttgcatgaaaaatatataatgccataagaattctcttcttacaatagctccgttattgtttcagcatggtaacagcatcgtttgtctttccaatcataggcaacaccattacttgtgaggcccattattttctcaagaattataccagcctgcttctaagtatccatcacctcattcttgtgccctttatgtttagtggcacaatgcaaaggttttatattagaagagatcttcagtcacaagctgctcataagaaacacctggtgtaaatgttaaccaacattaatcttttctgtatacctaaggtgttacctgcatcagtgagtgcagctaacgattgcttcttaaaatttttctccacttttcaaagctttcattccctttgaaaaatattaatctttgtataatggtgctgtttgattttggctaatcatcttccttctgtgtcttatcttataaggtaacatgttaagaacttggtctctataatattttctctcctcctagcttttgagttctggatgaaatgtgcaatctcttttctgagatagttgaacctatttgacttgaattacttaatctaaaataatgctaatctttgtgtttttttatggccctcaccccaaaatgtaatccctgaaaaacctggaaaagtcttctttcctttcttcctagaagctttagggacagccaaatgtatttgcttctttcctatccactccaagcccagcatagtgcttactgaattatttccaggtcaactgaaaactatcaatatttaaatttcttaagcctgagattttatagcacacatcttttttctggcccaaaagtccatgtgcatcccattttcttacaactaattcaaaaaagtaaagcaatagaaaaacattttttcccaatttactaagttaataacatgtgggaacacacagttctatagtacattgatcaaaatcctgtgagaagtgccaaaaataaactgaagagttataccctcttctctgggagggtcttatgggtataattcctttcaataaagaatatgctgagggctgaccttctggtaaaatgttacatgctcccacttaggacctctttttggattcatgcaggatttaacctagaaatatcttaggaacctgatgataagttaatgcccgtgtatttctctattaatcagaatatttgactaaatagacaagtcctttttcttcactatatgatttcaagagttcttagatatgttatttaaatattcattgttttggtaaatgtgtatatatttgtctttgatttgtttataatacagggacctcctggaatacaaggaatacaccaaactcttggtggatattataacaaggataacaaggtatggcttcttttttcccataatttataatacatagaaattttatatgattgtatttttgaaaaaaaacttattaattcctaacttctcagacttttatacatgatcacatgtatttaaacatctttccatactgaaagctatgttttcaaaaacaaaaataaaaaaagtattctgttcagtatcttacaaatctagggttttatcctaataagttttttaaaaattttgttcaaagattgttaatgcaaaacattgtgttccaccatcaataatatcatagatctagcctctctgagggcagaaagaaattatttgatactttgaagctctgggtagcacaacaggtgatagacttcttatcaaaaccaataggtgttgcgccaaaatctcaagcaaatatttgcatactacagttcaagaatgagagtccccacctttcatggggaattacattcaatttccccacggtttttttaaatcacatttgggataggcggaatgctgacgtggaagtatccaaatggcaaaagcaagggagttttgttccagattctacaaggagcataatagagtggcagccaagagaagatctaggtgagatcattgattgattcatcattcaatgacaaatatttggggtctgatcactttgtgtgaggcattctgtccactgattaggataccttgtatacataatggttcatcattgatttcttgcaccacagaaagaattggagacacttccctttatgtctttcttttccatgttcttactttcccttcctgtaattttttctgacagctgttactcctctttgtttagaaatcccaaagagaagtgtcaaaaaaatttgttaaatgactagctaattataaaatcccagtttctctctcttcagaacaaggtcaacataaagacttagataatttatggttgacaaatttaaaatcaaatatggaaagttttttatactttataaatttgatagtgatgctattttaaattatctcctttatttaggttttccagggagtattatattaggaagaatgtttgggatatatttcatgtttccttattaaacacttctttaatttctcaacctactcatctgacaaagggctaatatccagaatctacaatgaactcaaacaaatttataagaaaaaaacaaacaaccccatcaaaaagtgggtgaaggacatgaacagacacttctcaaaagaagacatttatgcagccaaaaaacatatgaaaaaatgctcaccatcactggccatcagagaaatgcaaatcaaaaccacagtgagataccatctcacaccagttagaatggcaatcattaaaaagtcaggaaacaacaggtgctagagaggatgtggagaaataggaacacttttacattgttggtgggactgtaaactagttcaaccattgtggaagtcagtgtggcgattcctcagggatctagaactagaaataccatttgatccagccatcccattactgggtatatacccaatggactataaatcatgctgctataaagacacatgcacacgtatgtttattgtggcattattcacaatagcaaagacttggaaccaacccaaatgtccaacaatgatagactggattaagaaaatgtggcacatatacaccatggaatactatgcagccataaaaaatgatgacttcatgtccttgttagggacatggatgaaattggaaatcatcattctcagtaaactatcgcaagaacaaaaaaccaaacaccacatattctcactcataggtgggaattgaacaatgagaacaacacatggacacaggaaggggaatatcacactctggggactgttgtggggtcgggggaggggggagggatagcattgggagatacacctaatgctagatgacgagttagtgggtgcagcacaccagcatggcacgtgtatacatatgtaactaacctgcaattgtgcacatgtaccctaaaacttaaagcataataataataaatttaaaaaaaaaactaaaaaaaaaagtggtttatatacacagtggaatattatttagccataaaaagaatgaaatcctgtcatttgcagcaacatggatggaactggagatcattaaaaaataaaataaaataaataaggaaaaaaaactgtactggctttttcaaaatattaaggcttagcacaagtgaaaaaaagaatgctgaagcatgtttaaatttaatcaatttaatgacacctgtaatgacacctgctgttataaaataggatttatcataaatgcttcaaaataatgagaataagttggctctgatgtcacagtgtcagctacaaaaacttaaagaacacactatattactatcgcccttggtataaaatatacctagttgctacttagctacttaaatatttgctatcccttgcaaaacttttaaagctcacatctttacaggtctcccaaccctacttctctatacagtttatcttgctgatgagtcagttttcccttaaatgaagatatatggagcatttatattttagagtctaaagttgagaatgtaaatttttaaactttaaggttatatttcaaaaaaaaaaaaaaaatgggcactgaccagagcagctgagtggaaaatcttgctagtaacaaaccagtactttgaacttaattattaactcacctaaaagaaccccagttattcttcttgccattacagaatagaggctcacaggtatttagtccacgtgttctctaaatgtgactttaaagctggaatatgactggataaacagaaaggagtatagctgttatcccaaatgatgcactataaccatttagcattagaggctttagatccatctgtgaattaagagacaataacttaccaaacactttattctgtttcctttgggagtagttagagcccttacaccaaggccccaccaagaaggatggaggtggtgggacccactttcccagcacccacactgccccatgcttctgtattgtaaccacctcctcctcaccctcagcttcataagggaaaagccaaatgtgctatgatgagcacgatgcatgttttccattggcattgtctccaccacctacccctgtctgtttttggacactgagattgtttcattttgcaatttgtagtgtgccagatggtctgactgtagcaaataagcacagagaagtggggcctgagtgaaaccttcctagagattaaataatggaccatgtattgagacatagcaagtgacactccaaggttaaaataatcttcccttttaaattggcattgatttatgtgatgtctgcactggagccctagacctcagctcttcaactcacagtggcttcaacagtcacacagcccagattctgctgaagcaactacccatgggagaatgagtaacagactactcataaactgcccctcctcattccgagctcagagagcccatggttcattttccggtcccaggatcctcacttgccctctggcccccatataggaactgatcttttcctctgctattttccttatgtcatctggagggagaagctcaggtatgagaaaccctctctcctcacagcacaaatccaaaaagggatggagaaggaaaaaaaaagcaaatgaggaagaaaaaaaaagcaaatgaggaatagagagacagcctaaggagtgaggtcaggaagatggatatgagtgtgtttatgtggatttttgcatgcctacttatggatgcaaagaataaaaggtagatttctctctctatcacaaaaataatgtgcaaaacagctgctcccattctgcaagattgttcgcaaagaagcaacaatgctgagcatattcttcccctcaaggaaaatctgctcatgttccagtaaactgcacttcattgtttccagctctgggggttttaataaaaatttgataggctctgtcaactactgaagccatcagacccacagttccttactacactttaaatggagaaaaaaaaatacgttttatctgcggaggccaagtgctggtggattttatatttgatgttgtttttaaagctccatattgaaaatgcagagttgtgttatcttacatcaccacactcggtctcagctgttggagatttatgctgtgcctcccagcaaccaattcttgtattcatttctccaaattattgatccaaaaaaaaaaaaaccaatttgctagcaaaataatctatttttcttttcacatattaaatcataacttcactttaatatccacagactagaaaggacagaaagcctttatccaaaatccaatagacaaggcctttccaagcagtgagttaaacccaacgatggcatataaagtgtaggctcccttggagacactgcaggcaaccttcctgggcccagaagattgagaaataaagtttaggttctaacttcattgctctccttctctgtgccccaggctccactggctttgaggaacgttgtggacttaggcacagacatatggactttcagatgttggtttgattacagacagccccccaactcacctgagtcttcccttcctttcatgaccctccacacttgcggctggtgaaatggttttttgcagataactaagaggttcggctttgagccagccttaggccttattttcaagtgagcacagctttcctagcccacatattatgttttaacttgctagggctgccacaacaaaatatcacaaactgagtggcctaaacaacacaaatatatcatctcacagttctgggggccagaagtcaagatgaaggcgttgtcaggaccacgttatctccaaaggcactagggaggaatatcttccaggtctctctcctagcctctggtggttccttggccatcttcacttcaaactatagcaatagtgatctgaatgggtacctctgtatattttgttgtctaaatatttctgtaccttttaagttttctatcagcacatgtatttttaatcagaaaaataaacttaatggaaaaaccacatgattagagattactggctcatttgcccaacagatatttattgaatgccaggggaggctttcatgaatggcatttcataatagttgagacttgattaatgactagtttctggccagacaaaaaggtgagggcaaagagtggtgatctggaggctgagatgggaatgaccttggtcagtttagggagctgaaaaaagaccatgacagctgaaacttctgaggaagaagagtgaccaacatgatgctggagagggaaatgagttcaggtcatgcagagatttgaaggtgatattaaagttttgagaaatggaggccagaatgtcttttgaaggtatttctctgatcttatgtagagaatatgtgtgtcaggaaagcaagagtggattgtaaaaggccagttagagactcactgcaatcctggcaagacatgatggtgggctgcctgggtataggcaggttgactctgtctcttaagagaagagaaaacatttggggagacagagtcaaccaaactggatgactgatcatatacaaggaataaggatgagggtgattatattagtctgttttcatgctgctgataaagacataccctagactgggcaatttacaaaaggaaaacgtttcatggactcacaattccatgtagctggggaggcctcataatcatggtggaaggtgaaaggcacgtctaacatggtggcagacatcagaagagtttgtgcagggaaacttccctttataaaagcatcagatctcatgagacttattcactatcatgagaatagcatgactcacacccatgattcaattacttcccactgggtccctcccacaacatgtgggaattgtgggagctacaattctagatgagatttgggtggggacacagccgaatcaagtggtattgagaatgacactcagagaggaagagttcaggttttctttctttccttaattgttttcaattgtagaatggaattcctgctcaatttaacaagaaaaactccagagatacattagaaaaaactgattctttttctcccatttctgtactaaacaatgttagcagcgtgatgtaactctattttgttctctcatatgtgtatttgttgcattttttgtttcagttttaaacttgttgactatgaattgcttctagaatttacaagtacatacatcaagtagaaaattagatatatgggtctaaaattcctaagggaagtatatgcggggaatataaattagatatatgggtctaaaactcagaagggaagtatatgctgggtttataaatttggctgtgtaaatattacctaagccacaaaggtaaataagagtgctggggagaaagtgttgagtcacaaagaagaaaatcctgaggaaatccaacctctaacagatgagggaagacgaagtcacagagataggaagaaaccaggagagtaagctatcatacaagccaagagagtgacaagtgtagcaagaaggtcgattactgaagagtccattagagtaagcagcaaagatattattattaacattagagggccacatcagtggactgatcggggccagtgtcaaatacatatgtgtttaggagtaaacaggagttacataagtggtgtcaaataaaaaattgcacctgacaaagttaaacaggcaaggaagacattattcaaggctattgcaataggagagagaaggtagacttagtctgagctcaattccactgaaacaaagttcaggagagtttttaagtattgatgtaagaaagagaacacacttccttgtgtttgctaattggctttacccaaaggaagagtaaactttctcatatctttgtgacaggaagaaggtttacaacttggcacaaggctgaagttaggctcctaccctcccacagagcctggaagatagtggcactatcttctccatgattacattttaaagggatggctcccagatccttgagaaagacgttcccagattgtaaaactaacaggaggcttttagaaagatttacatctcaaagggatagtgaaagaacttacaaatacagattttctaaagcgattggtctagaaaaagagagatcagggtatggaattaggaacaagcctgtccaaagttgattccagctgagggaaacattaaggctgtcttggtcagtggacgcaaaaagcactaactacccttttgagaaaattgtccagaaatgggaggaaagagagtaacttaagggaaatgtgtgctggggaactgtatgctctttgtgtgttaagtttaaagaaggtagaataggtaggtagtcagagagagaaagagaagtgttaaagaaattggccaattttagctacattttacttaactttaccaaattggccaatttcacctgatagcaataggtaacattaataaggaaaatctcctaagaaggcagaaggcatgggaatcagaggatttatagaggaaacagccatgataagagatgagacagctcattaactacacccagatgtgcatgcacatgggttggtacattcattggcaggaattagaagtggtgactgaagcctggcgcagtcgctcatgcctgcaatcccagctcttacggaggcagaggcaggaggatagcttgagcccaggagttcaagacctgcctgggcaatatactgagacaccattctccacaaaaaggaaaaaaataaaataaaataagtggtgcctgagaacttgcatttttttcagtgtagttacaggcaaggtcacttgcccaaggactgtagagtctaatgtagtggtctgagaacaataaagaagacttgagaatagggagagcagatcagagatgctcagatacatggagaggccagttgaagtggccagatgtggatttggagtagtgagtatttatccccagaggtgtgatgtttctccagaagcaatctccttaagaagtcacaaagaagatgcatggggtgtccaaagctggaattatttagaagaatatttaacaggaatatttaacaacaggcgagagagacaaagatgtctgcacaaatgacctagtatccataaaaagcggttacagaactattatctgactgcttatactgttacagattgaatgtgttaaaaattagcggatttttcttttgtattttaaattgtttttcacccctagggaaatgatgaacatgaagctggaggcctgaaaggagacaaggtaatcagattttttttttttagatggagtcttgctctgttgcccaggctggagtgcagtggcacaatcttggctcactataacctccacctcccaggttcaagtgattctcctgcctcagcctcccaagtagctgggattacaggcatgtgccacctctcccggctaattattgtatttttagtagagacagagtttcaccatgttggccaggttggtcttggactcctgacctcaggtgatccacctgcctcagcctcccaaagttatgggattacaggcttgagccactgcacccggcagtaatcagattttcaaagtgaatagaagggcccagtattttatacggacttacacattcccacgtagggggcagccccctggcagcagttgggttgcatctctgggagggtgtccagcctgcagtgggcaggggcctccgcctgcctcctgaccaggcagtaggattcgaatctgcttcagggtccagcaaggactgctgagtagcagttggctataagaaagagaacatatcaaggggaaattactgtaataagataaatgaaatcaggacacaagacttgttttgtaattaaatgtgaatccgtgtaggtggcaaaaacaatctgaagacccctttggcaaaatgcctcaagcccaggctcactattttgtgtcttcctaattaccaaaacataagctgccctggcagccatttttggtggggttttatactgtccagtagtggtttaaccaaataattatttcaaaatagttttaaaactaagacactgataaatttccgttgcattccccttgtcatttgcaggtttaattatcatagctgtaaagatgacagattcacttccccattcaataagatgtttcactcctgtttgattctgaaattgtaatgaccttggattccatgtgaatgtgccattgtcagaaaaaaaatgcacattaaatctacaggcagagatgagtagtttgaaaatactctgagggaatgtggcctgtgagtgctactttcattcattcacctgtaaaaattctctagattgagggcaggggattttgacatgaatccaagaaaatatgacttctgtgtcttataaatcagtgcaaccaatccattcaaaaagtcgtacacccatcaccagaagttactgctaaaagatagtctcaccagaaactaggagcttcttacagattgatgattgaaaatgaaattttctgctaaataaataaataaaggcttgacattctgaaaaagacatccaaaaattgattatacagcaatgataagtcatttgtgtgagttagattttattgctagtacattaacattatttcctgtaacctaatagctaacagaaaccatacgccaccataaccaacgcattacattttaagcaatgacttctggacatatgcaggctaaggggaaaaaaaaggaaaagaaagccacaaagcttgtcacataggacagctgagcaaagaagagtgttgtgacttttaaagtatttaaatgatgattcatttcttgaaacaaaacagctgggttctgttttgctgtgttcattaggaaacatatgttacttagacattcttaagacctcactgatgagaaatttgattctgtaaaacaggtgtgtttcaaactctaaggaccttttctattgctcaaaatcttttctaattgcttcagaatcttaagtagaattaggaaaagccagtggcataactgttccctcctctcactcaaataaataacacagaaaagtctacagggaacttgatgcagtacatgatataaagagacacataaaaaaacttttaaaaagcgtgattaacaggaaattgccaataaacaatgcataaaataaacaaaaattacaggtggtagctcgcacctgtaatcacagcactttgggaggccaaggcaggaagaacctttgagcccagaatttagaccggcctggacaatatagtgataccccatccctacaaaaattaaaaatattagctgggcatgctggcaaacacctgtggtcccagcttcccagggaggctgaggcaagaggatcacttggagccaggaggtagaggctgcagtcagctataatcacaccactgcaccccaacctgagcaacagagcaagaccttgtctcaaaacaaccaaccaaacacaaacatgagcatagcagttgctggaagggtgaaatcaactctacctatgtaagtctacttagtatctcttctgaatcaatacattagtttttaaaattataatgtaatttaatgtaatgtaagtcaccacagtgaaaatttaaagctccatcaagctgttctcagagatctctgttgcacctgtggcgaaccccagtgcttctgaatcctggctgcacattggaatcacgtggaaagctttgacaaaatacccacactcaggctccatccacagagactccgatttagggtaggggtcttatctctatttagaagtgtttcagatgactctaatacacaaccagggctaagaaccactgagtaataggaagagcatgagctttgggacaaaaagttgattgtggcattaacagctaggtcaccttgggaaggccacttcatttctctaagcatgcatttcctcattcacaccatgggcagaattgtatctacacaaagagttgatagaaggattaaaattaaataagaggaagttactcaaaagcgcaataactaaaacacatataaagccctcactaaagatttgttcttttctattcacccatctcaatctttccttcctctcatgaggtctcatttagcacttttgaggattaattgttgttctcattcttagcacctggtcttgctcatctttgtatctcccaccataattttgacaaagaagggactcagtttgtgctgtagaataaaatatttaaccagaagaataattaaacacataagtgattcaccattcctttataatatgctacttctcaatgcactgaccagcaaaatagaattactaaaagagccaaccctttggaacccgacactacaatgaagcaccaggacaagcacaaatagcactggaatatacacaccagtcacccctggtttagcagccacatcctgtatcaagaacactacgatacagggagaaccacgacttgcagtaaatggccatggagaccatccacatgaccagtctaccagtgtggaaatgaacgatccctgctctgtggcttgactgagactgacaggatgtggtgaagggataatgtacttgcaagttacttgaggagaactgctgctttatagagacagtagaacaaaatatcagaatatcttagccctcctgagaaaatagcaggtgtcttgtgaggaagactgtcagggaaaaggtggagtcactacagcaccaagctaatagcatcgaaagtgtcaaactgaaggagagtctttcctaatgcaaagtaacttcatcacttgtgtttcaactcatctctacagtgataaatcactgaacattcaatttaaataaaaaatacaaacccatatgtgtctaaggttcaggtagaaaatgcttttgcttgcagaattttatgaggaaagaggtctctaagatttccttccagcccaatgtcatccaacgactatgtggaaagatggactgcaaccccttttttgtcctgcccctgtttacctgtagagcagctatgaatatacttacttttatttcaccatgtacattgtcctccccttcccctttgatattggcagatttgatttttacaagcaattgctagactccttctcagctttctacttttattttattaggcaagtctaactagtaggcatatttttccttcacacctatacaatggaaactgtagcacctaccagatgggtaacacgaaggtcactctgtacaccctaatgcctatacaagtctaattgtttattttctctatcaaaccaacaacaatttgttcctaaatgtatcccccaacttctcccttgccttaccttgaatataatttactatgtctaggaaaaaaaatggcttctcttataatgtggtaagaataagactgatgatacacaggatgtttagatactaccatagaaaaaaacaatacttacgtagcttcctctgaattaggaaaaagcctgtatacagcacactaaactttaaatttgatggatattgcttcaaaaggcacattgaatatttaaattaagaacgtgagtgaattcagagaaaaaataagctacatatatataggtggtatgtagacatagcgaatattacacagttgggatgcggatgactgaactttgggaaacactgctgtagaatatttgtactgacaggtctgcaagttggcttcttatccatttggttccttggctctccaacagggccttactattactagctgaaagcctaatggtataaaaaattagtactgaggtgagtcagaaaagcaaacacttctttcctagtatcaactctcacagcacaaaatacttctatgaccaaatacatgaatttttcacacacagcaagcaagcaatcagttttgcaacagacaccagctgattgtcttctaattccattcaattctgacactatttacctggtggtagcaacagatcccacagattgagggctcaatcccacaatgctgccttccacttcatatgccaatcgaaagccccgtgttgttttatctgtgcttttgaccaactggctataaatcggggtccttatgaccccgtccgcggcactaatttgctggaatggctcacagaactcagggagatatttacttacgctcaccagtttattataaaggatgttacaaagtttacagatgaagaactgcataaggcaaggtatgtgggaaggggtgccaaggttccaagcttccatgccctccctggtcatgccaccctccaggaacctctaaacttcagctctacagaagctctctgaacccagtccttgtggtttttatggaagcttcattatgtaggcgtgattgattaaatcatttgtcactggtgaccaagttaaccttcagtctctctcccctccccagaggttggaggtgaggctgaaaagactgtaatcaagccttggtccttctggtgaccagcccaatcccgaagctacctaggggctgccagctaccagtcaactcattagcatacaaaaagacgcttattgctttggggattccaaggattctacgagttgtatgccaggaaactgggaggaagaccaaatatgtattttacaatattgttatcaagcagatgggctcactgcccactgtgcaccgaagccaataactatggcaccagcttttcagaaaagaaagattgtattgcaaaatcagccagcaaagagaccggaattgggcttaaatttgcctcctggatttggggattggggcaagttttaagggatcagagggcaagggacgggatttagggatgttagtttggcagaatctgattggacagcttcaaatttgaccatttatggtaaggtatgttgaggcagatttttgccctggatattccaggctaatggacttccatgcttctgaaagagttcaggttctggtcatgtcccggtcttcttggttccacccagggggtggaattgttggttccagctgttgttacaagtcaaagctttttctgttatgcgtgcctaggctgcatgacttgcagttttgggctctgttataccttaaaggtaacttgacattttgttatcaacagagtaggccctgtttgggctggttccacagttatactatcacatgaggttttaaaattttagtaaaattaagattaaattaaacaaaacgtattccataaatctagaagactaattaatacaaacatgatcttgtctatccattacagaaaatcacaagacatggattaggatatacatataaaaataagccaaagattttagggctgtagtaaatttatacttgaagcactttttggtagctgtttgaggcttcaaaatgaacaattaggcacatccacaggggtcaggattagagatgttcactgcagccttgtttataatagagaaaagctgattacaatcaaagtgcccatcggtggggctgagataaacgctggtttattaacatgttagaatgctactcatctgttataatgaatgaatgagatcatatgtatcaatagagatggatattaaaaacaatgctgagtggaaaaaacaagtcatagtatgttatttatgagataaagctatttatggaatttgtttcaaatattcaataatatattgtttatgattccacatatgcagtaaaagtacaataatataaactgaaaatataaatactaaattcttgagagtggctccctctgggtggaaataggaaatataggggatttcttctttgtaaattttttaatttctttcattttgggtacctggtacatgaaggcttggtgtattctactttattatgttttctgtatttattcttttgaagtaaaaaaataggccaggtaggcaaaaacggtatatgctcagaaatgtaatggtgaacatcattttgcaaaaatgctcttgaagttagggaaaaaaaatcagcattacatatcttctagagactatgtttaatttaagaattgtgtaggtattcagagatcttggtaaacactaaaaggatgcacaatgctgagactcctctgaagtctcattagtgatataactcctttcttaagtattacttctcaaattatattttccaaaaacactctttatatgtcacatacagatctctcttcaaggtttttgaccagaacctcttagacatttctaagctactgctgtcaccacatctacaagaatgccttatttgcccacagccaatcatctaagtagcattataaaccctggaaacagctgagagactcgttttgcttcatataactgctgactctgcccacctaaacaaagaaaaaagtgcctgaaataaaatgagtctggattattgtgccagttaaacagtctgatgtctttgagatcacacacaaaaaaaattggttttggcacaccagaacaaaattataatttttctcctctagatagatattctttcctggaaaaataattaactttgtttcacattacatttaagtatcataatgaaatatatggatttctaaaagacataaagccattgtgaagtactgacaaacacattatcataaaaatagcctaagtagattcagaactttgcattgtctgttggatgctaatagataaattgtatagttagcaggagagcaagcaatcattctgtatctgacagtcacaataatgcttctctaaccatctgcaaaatctctcttctgctttgtcttgaaagggtgaaactggactaccaggatttccagggtctgttggccctaaaggacaaaaaggagaacctgtaagtattttagctttgaggacagaggaagaatatctaaaaaacgggattaaaaatacgtttccaaatcagccccaattccacgtgccttggttgatcctgtcatgggaaacaacagatcagatcttcaagcaagtactagctacgctatgcactaagtctcttacatgtatttacacacttaatccataaaaagtttccataaggtcatctattatcacctgcatacttcaaatgatgaaagtaaggcataaagaggttaaaaaactttgcccaaagtcacacagtactaagcattggagctgtgaatcacacctaggtgagttgattctagaacctaaagtttaaaatcacaaagctcctctggtataactaaacactgcagctaaaataataaaatcaatgtatcaaaagactagtacaaatttatccaaaagaaattggaaacacatctttctgctcaaacaactgttctcagtgtaccttctgaagttatttttctttcttgatttttgtatgatcaaagtggcttcccaaccactttttggtattactgtggccagtttctttcaaaatgtagttctttttgtggggaaaaagagaaaaaccctacagtatcatttatattcaaataggaccacctaaagtgattagagaaatcataggtacaaaaaatgacttgttttaatgcttcttttaaaaaagcagttttcaagaatcagtgagaatcaggcttaacaaatgtttcatctttgtttaaagaaaagtaatacatcttattaaaccactctacccctttctttacgagactgaataaaggatattggtttatcaggggataaaacatgaagaggtcactaaattgcctgcatgacaaacaggaacattatttaaagtattcagtgttacaaagccaaattttccctatgcttcagctttaaaaaattaacaatgacagtaatttttgcagctttagaatcagtctgtggcctatgtaccccagttcttctaccttcaggagtcgtgcttgcccttagtattcagttcaagccttcttacacaactacaggatttggcagtctttaatgaggttctccaactgagtatttgcaataatgtctggaaaatctcatgtctcagaaatccagcctggtgcatgcccctggtacctgccaactctctaggtgctccacacttggaggttcctcttaccatctcttagctgcttctctaggtctccactgtcttccctccaaacctgaacactgacaccaaccttctcttaatttccacatgatgcatggaggaccctgcagtaagattaataaaaattttactggaaaatcgaggatttttagagcagaaaggagaaactttcagtgagttagagcggtgcttctcaaatgtgaacatgcacttgaatcccactgattctaagtcagtaggtttggaagcaggaccagagagtctgtgtttctcataagctctcagtaatgctggtgttattggtccatggaccacactttaagcagcaagggttgaaggagttcatagttcctaggagtcataggccttttcctcctgcagggatttcctctggctttctttctggctaactttcaagggcagtccatgtatctcatgaggactgcctttagccctgttttccttaaatagagcttcttttcctcctaactcttctccataccaggtccctattcatcccttaattatcccaccaccccatacatctttacttgccaccttcctctacccctacattaaaacaacgcaaattttacattattacggagagcagtttagctttttatggtctcaaactttctcttccagaacaggatgtagactttactttgcataataatcagaaggcccaaacagaagagtagtattcattcaaaggtaaattctgaaccactgatcccgaatggtaactaaaatggcaaattttcccccaccataggacattcagaatatggtttgatgtgtaacacatcagagctaaaatatacttaagatcacctagttgaaccccatgattttatagataaagaaaggggagctctaaaagattaagtgacttgcctcaaatagtagccattggagccaggactaaatatcaagtatctagacaactaggctcccgggtttttctctttttttttttttcttttataaccagttactttagtcaatgtggccactaaactttacagtggctgtaaataagcaatgacatgagcagtgtcatataagcaaaaacaagcagggaaataagaatataaataaagccttgatctaatatatagaaatcaaccactattaagatagttcatcatgttgggtagatatgggtatatagttgtcccttggtatctgtgggggatgggttccaggactctcagaggataccaaaatctgaggatgctcaagtccctaatataaaatggcctatttttatttgcatatcacctatgcattctcctgtatacttcaaatcatttccagattacttataatatatattacaatgtaagtgctatgtaaatagttgttatactgtattatttttaaaatttgtataatttttattgctgtattattttttattgtttttctttttcaaatattttttatccacaattgcttgaatccatggacacagaacttacagatatggttaacctcttcaagtcattttcattaaagtaaaaataaaaactaggaaactatttttaaaataatgagtttgtatatttaagcacacaattaaccaactggaagaattcaagtgaatgtctttcccttcaacgtttttatcaatttcttgctgtcattcccatttcacattcaattggatgtgtgtgtgtgatcgttttctatgtggactaggcaataggaagctttggccttgggcagcattccaatttgtcagccacttgggattttataaatgatgttagaatgattaactcattgttcatttgggaatataaaggagtttttaaattaattatcatatatttcctttaagctgcaaagacagactgtgtgacactctgggtatttttggaggtctgtttgcaatgggaatctgagtttggcctatagggtttatccacaccccggtttggagagtttatttctaagagcgtttaattctattttctaccccttctccttagggagagccttttacaaaaggagaaaaaggagatagagtaagtagatattttatcactaccttgggttttctacttcattgatttgtttctctctgattttctggtatgtttactttggagtctaatagatttgattaaataaggtccatgagcattttactttttcctctgtgatttttaactcttttattttgataaataagaaattttaagccttgttaactgttgtcatgcaaggagacttcaacattggtttgagttttctaatacattgtttaaccagttactaatagtgattggacatgaatgttatacaagacatccatgtaggatatcaaaaatataaaattaaaataaaagatacatttttttccaaaaattctgttaatggcacaaagtggatttatcaaatatattaataagtcacagaaaatttaaaaagcaaacttattatagccagtatcatcctcttttgtataaccttaattttgttgtgatttttttcattaagcacatataactaaccattaagcacatataactaaaagtagaatcaccaacacatattaccttaaattctactctccctcattctttctctgaagttttaattctctgggacatgagattagttggtgtcaaattataactatgtcagctaagtagagaatgcagtgattgctaatgggacatgataattagtgtcaaaaatggcattgggggaaaaattattataatgaagaaatcaagaaagtattatttattagtagtaagtattttgaatcatgttttagaatgaactctccttgattttattgtgtcttccataatttccctttttattgtatgttaattagtagaaattcaattaaagtatcagagatgtccatttccatctgaatttaagcattacccttatagtaattattttatttacagggagaacctggggtaataggatcacagggagtaaaggtaatttcctggcattcttcaatttcctctccaaccttaatgagattatgaaaattaaagaaacattgatctttccttccccccacgtgtttagggtgaacctggagatcccggaccccctggtttaataggaagcccaggactaaaggtatataagaaataactaagatttcttgggaaataatttgggaattgtagccattctgtgtaaaacatggtgctttggtatgccactcattttcttcacaaatgctctccaagactttatcctgtttccatggtgattttccccactggctgcatttattacacgcatagtaactgtcttttggttttcacaataggatttctatactctttttcagagcatattcacaatagcatccctaaaagccttaagagtaaacaatgtgagctaaatctacgaccttgagctatattctaaaaggaacagaattcaagtttcagtttctaaaccaaaattatgcaacgttgagttgcttgagtttcccaagtgggattccacaggagtgtcccaagagagcagcttttggaaaatgcaggagaaattaatgtggtgtactcccagacaatgggtagggcaagttaccaggtatcacctgctggtgagaacacataaattaaaagtatctggaaactatcttggtaatcacaaagcacatttcagtattatacagataaagtgggaaagtgggatggtggaaagttggtcttcctatacatgaagatcacactattctttacaaatactcaggtacaatctatctttttttttcttttttagcaaagctaaagtatataccaccttttattttagggtcagcaaggatctgcaggctccatgggacccagaggaccgccaggagatgttgtatgtataatgtctttgatatttctggaattgaaattgagactaggacatgtttttaaaaacatcaacatgtgttcaagtaactgagttatccctcatttcccaaagacatgggtcatctatgccactaaaactgatcatacctaatgtcaggagctattgggaagactagacccttcatataatcatgtgaggtccttttgagtatcattagcctaataaattggtttttggagctcaagttaatcaaattgtcattttggacatgcttgtcagtgctgtaccagcagtagaggagattggaaatgtcaaaagaaataaagaacaccaaaagagaaagcaaacattttcaatattcacagtttttagttcaagtctccatctaaggaagacatttcgaaagcttctatcattttctagcaaaagccttccaaaaaaagcaagtcttttggctaaaagtatgtctggaggaagatcgacagattgcattataacctagctttagtggacttaaaatactcaatacacctttctattcattatccggatcagctttttgttccttggacaactttctagccttctgacaacttgggagctgcgagctctccatcagttcacacttgagcaaaataagaaaaatccttggccataactccttggagactgatcactatctgactatgattagagttccctccaggcaactcttaggatctctccttttttcatgccctgggaacagccccttaacctcacattctattctccatgctcaccgcttgagcctctcctgtctactagtcggtgcacatattctgcttggtactttgaacacccagtttatagagcaaagcttttgatcactcccctatgccaagtaatgggccactgtagataaacctagtggacagatcttatgaaaagagagataatcctggtggcacaagtggagccacaatgctcaaaaactgagactaagtgatagtggccagagctataaaaagaacaaaatctaaagggaaagagccactgtttctaaaacatagtaaaaacatatttttctagttgccctagagttctttggaatcattatgtgatgctgccaaccaccatccttcctcgatggcaataatatgggtgagacgttcggttcaattcgactttagtttctttcctatggcatccaggtggcttcacttgaaacaacaaaccacgtagaatcactaatatttttccaggtcttaaaggccaaaatcaatccaactccttctattaataggttatatgttaaaattctgttctcttgacagagattcacagatatagggaaatgttattgtaagagatgttctcattactctttcctattaactctgagttttctagggattgccaggagaacatggtatcccaggaaaacaaggcattaaaggagaaaaggtatagtttacattttcctcattttatatgttaagtagataggaggaagagacagaggatcataagggagatgaaaggacagcccagggcttctgggattgtacagattgtgcacattaactacaatgtaaatggcaccccctagagttgtgcatttggcagccctggttctggcacaggaatgccatgtgacaaaatgaactgacagatgaagatatcaggagtctgaaagtcaagctcagttaccaatcctggtataaacctaagaagtctcttaatcttgcaggatctgtttcttgatatctacatggaaacagtgcattaacgttgaaccattattggagaataacttaaagaaaacataaagatcgtctatagaaatttattaatagatatgcccttttgtgcatacacatgcatatgtttcatgatactgctaacataactaactgcaaaatctaaatgcactgaacaggcatgaattaggtactcaataaatattattgagtgagttggtgagtgagtgagtgagtgagtgaatgaatgaagtttgactggctatgatgacaacttaaaacaatggaaaccactacctcctcacttcccaccatgaacctgagcatcaaagtaagaatcttaccttgttttctacagggagatccgggtgggatcataggccctcccgggcttccaggtccaaaaggtgaggctggtcctccagggaaaagcctgccaggggaaccagtaagtattagcccttttgttaatatttttcttgcaagttcattaattactacttgtgggttcctagtttcagatcacaagtatgggaataagtttaggtctgcaaaaaaaggaaaaaagaacttaaaacagaactaccatttgacctagcaatcccactactgggtttcttttcccaaaagaaaataaatagttctacaaaaaagacagatgtattcgtatgttcattgcaactctattcatagtagcaatgagatggattcaacctacatgcccatctacaatagactagataaagaaaatgtgatacatacaaccatggaatactatgcagccataaaaaggacaaaatcatgtcctttgcagcaacatggatatagctagaggccattatcctaagcaaattaatgcagaaacagaaaacgaaatactacatgtcctcacttataagtgggagctaaacattggttgcacaccaacatagtagagatgggagcaaaagacatgggggactactgatgggggagagttgaagggaggcaaggttgaaaaactgtcaggcactatgcttacttccttgggtagtgggatcattcacacaataaacctgagcaacatgcaatttactcatgtaataaacctgtacatatacccctgaacctaaaataaaagtcaggggaaaaaagaaatattcatctattcatcttattgtttcttttttttttttttttgagacagggtcttaatctgtcacccaggctagagtgcagtggtacaattatggatcactgcagcctccacctccgggattcaagtgatcctcccaccccagcctcctgaatagtggtgacaacaggcacacaccaccaagcctggctaatttttatattttttgtatagatggggtttcaccatgttgtccatgctggtcttgaactcctgagctcaagtgatctacccatctcggcctcccaaagtgctgggattacaggcatcttactctataaatcagagataaaacctcttaaaagtttgataagcaaagggctttcttctgaagaaaatatacatgcatacaacattttgcatatgattttggaagattcctaggtcccctgaatcctaggcatgaattctgtagagatctatggatcccagtcaggtacactggttttaaaacataaacgttcctagggcagtattgtaaaacagaaaaactacctgaaatttctcttccagaggttttgcagatatcatcatggtttgtcatttgcagaaaatgtctttgtgacccagactattcccaggacattgaaaactggactgccggaaaatctaaataaccaatgtttttaaaatatgttttatatgcctttgtttttcatctcctttgaactttttatgtattaaataataataatatttctcaatatcaggtgcctcattttataaataaaaatattttatattttaaagcaactatacaaaatctataacatattgaaatttttactccccgttccttattcttttatagaaaaagatttattcaagcaagatgaagagtgatgaaacatattttagttataacttctaatgtgtttataacttttctagaagaagatatgtattcatactttttttcttttagggattagatggaaatcctggagcacctggtccacgtgggccaaaggtatacaaatattatagttaatttttaaggaatgaataattaacaaaatacagcagaaaaatgtatgtctcttgagccttgcagtaacagaagcctttcatttcacagggtgaaagaggacttccaggtgttcacggttccccaggggacataggcccacaagggataggaattcctggcagaacagtaagtgaaattcattcgagtccttgttgattccaacattgtgaaacaaaatccagtgtcaaattttaacaaggagaaaagaatagaaaggtcagagacggaaatacaaataaacactatccagagatgactgatcagcattgaggttgtatcacttaagcacagagacagtacccactgtttgtttattaacttacagatgctggtcacacatacactaagtttggattagaagcagtcatttaacccttatacctctattctatatattaaaaagcacaaatacatgtttgtaagatagtaagaatgcctaatattaggtcaatatatattacagcttgtttttaattaagttaaaacaagaaattaatatttaaactggatggagtatgcataagtgaaatgacaccaaaaaggtctgagtaacgtcttcagagtgaagagatgatgttttcaatggtaaaaataaataatgagaagtttttaaagtatttaaactataaggacagagcctagaacagcccctattaataatgaccactatatccacacttgtagatcaaataatagtaaatgtacaatttttatttactatggaaagacataaaacgtttttgaacaagaaaagtggaaataaatggttattctaatgacattaatttagaaaattggtctgtgtggtgtaatacaaaaacaaactaattgttttcatattatgctcttaacattcaacataaatacaattctgacaccagctgtgtggggttttttttcccctactcatcaattccccaatggacatcaactgaatgttctattagtcaattcatgtctgacactatctacctggattaagagtcagatcccacaggttaagggctcagtcccacaaaactgacccctacttcagaggccaactgcatatctggaccttcatgacttctgtccaaccagctataaactgggagcttccatgacccccacctcaggttctatagtttgctagagtggtccacagaatcaagtaacgctttcttacgtttactggtttatgatatcagtaaaggatatgataaacgatacagttgaacagtcagaagagatacaaagggagaggtctggaagggtccctgagtgtaggagcttcagtccccacggagttggggtgtgtcactctcctggcacatgggtgttttcgccagcctggaagctctctaaactccatattttgggattttatagaggcttcatcatgtcagcaagattgataattaactatatttccagcccctctcccctcttcagagaacgcggggtgggctgaaaggcaagcttctaactgtggcttggtctttctggtgatcagctcctatccaggagcccaccgagagtcacctcattggaacaaaaggctctcctatcacccaagaaacccaagggattaggagctctgtgtcaggaaccagggtcaaaaaacaagtattagaacaggactttatgttagcaacctattgttaaggaatttacgagggttttaggagctctgtgccaggaactgggggcagagaacacatattattttatcacaatatcacatccttatattgaagttatcatgaaaagttaaaagaaagcataagcagtgaagggttatgttgtgaatgagggttgtctgatttgccagggcaagaatgtaaaagaacattggagatggaaattaagccaagtaaaaacttgtatcagaaaattattagaggctgggcctggtggctcacacctgtaatcccagcactttgggaggccaaggcaggtggatcacttgaggtcaggagtttgagaccagtctggccaacacagtgaaaccccatctctgctaaacatacaaaaattagccaaacgtggtggtgggtgcctgtaatcccagctactcaagagactgaagcaggagaatcgcttgaacccgggaggcggaggttgcagtgagctgagattgcaccactgcacttcagcctgggtgacagagtgagactccatctaaaaaaaaaaaagaaaagaaaattattagggaagtgatggtggtcgaggaaaaaatcactcagggacacaggataaataggaagggaggaaaaagtagctttggcaagagcagtgatatgaatatttatttatttaaataagaaaagaaaaatcagtgagcagttactgaagtcaactgctaagaaaccagctcttgacttacttaggtgaacattcctcatgcagaagttcatggttacctaagagcggtacaactaccatcgttaagttccctgataatctcccagcctcattttatttatccgaaattctaattttctaaaagtagaaaaaaaaatcattgattagtgttttacctcctactcctgtcactgaacactgtttctggtgatttattccaagagataaatgactcaaagttgaaagcagaaaagaatccctgagccagttacccctgtgggtggtcagtttctgacaggtggaatttggatgcattctttgtgccctcatgaatgtgcagtgacagattatggtaatgatatagatgtcccaagtccctgagcaaaatcatgttgatgtttccagcaacaggtatctgattaagtattcacctacgacctgaaagtcttggccgactttgcagttttccacgtgtgtacggtggcaaaccctgttgttcctctaagtaaactacaatgcttagtcttttatgtcacttggataatttatggacattcttggtggaattttaataataaaatctcatttgtactcagggcgcccaaggaccagctggagagccaggtattcaggtaagctatttaactaattttttagcacagcaaagccagcttgcttacttgggggaaatgactgaaagaccatcctcataagtaactgtttttatttccctccttttccagggtcctcgaggtctccctgggttgccaggaactccagggactccagggaatgatgtaaggactttctttatctaccctcccccattttaatctgcacctgtgccacgtgcaaagattgaacatggatacctctgttttcagggagttccagggagagatggaaagccaggcctgccaggccccccaggtgacccggtatgtagacaaaccttgtctgatttatgtatcttaaatgcacccagaagccaaacagcctaccaagcaagttttgctgtccaaactaattagaatgctcggtgactgcttggtgattttgtttatccccattattttgtcgagtgaaaaaaaattcaggctggatcagcatttctgtgtgtgtgatgaatacttatttcctaagggcataattcaactgtacaattttgccccaggctgagccttggcatataatgtctcaatcccattgaaaattgagataaaatatattgccacgatttctattttttctaatgctagtggctaaatgaatttcatttttctaaatgaaattttgcaggtaagttgcctacaatatggtatagatccattgattctgtagctttaaaatgttgcgatgattaaattatgaaaactggcttgagtaggctcttagaaaaagggttaggcacaaatgtgtgtttcaaagttttattttaggttaaaccttgctttgagcaacagtgaaacccctttaaatagcctcagactcggcagttataatttgagaggccatatggtacatgacattgtattaagagtcttgtataataaaatccaaatctggcttctcagttctaagcctcacaaatcctttctacctcccacagtgtttgggccttatgtgcctttataagctatgtgtggaggcatattttggcattactttaacgccactgttgagtgaatcacttgtgcatttttctgggaatcttgcaaaaatgttgcttgggtttacacagtgtctctctgaaagaacatctcaagacgtgtggccaaaaggtagcccaagttccttcagtgtttgtcttgcctatcacttaagccaactgtaggttctttgaacttccatgagaaataactttaaggcaaacttatctggtacttttcatatttctcaacagcctgatagtgtgttcgccagaggaatgatttccttttaataaataatttatctttatgtattatttaaaaccaatgatataccagggacagcataaaggttgccatgaaaatataaaatagggatgcacagtcaaaactatgatatgtgtgtttgcacattcaagagagaagaatagtgaacatttttcaaaatttgttctgaattctatcagtgccatgtgcacatttctttatacgaaacataatgttaagccagtgattctaaagtgagacaccagaagcttcatggcattttgaggaaaaatgtctacattatactgtatgtttatattgtattgtgttcatatataaatgcatgtatttggttttatcttcttaaccacagattgcacttcctctcttgggagacatcggtgctttgctcaaggtactctattgctatgtaagaaattatgtgttaatttccaggaaaaattagaaagaaaaatatttagcagaaattgagtcaattgcttagctggaactaaaattcaatttttaaatggcaggacatctttaagataggaaaataaacatgtatcttatatatcttgtgccatttatcctaattctttcactctcttcttctttaccagcctctcattttgggtggggcaggggtggagggcagctggtaggatagttatgaattggctacagggaaggaattatgtcattagcactctggagtagattattctctcctctggaggaacatctttctcttaatgggtgttgactcaccctggctcactactgtgaaacctaatctttctcgctatatctggcctggtcagtcccaagatgaaaatcagtgctgctctataaatagccacttacaaggctgaattttgatgtcataggattttacaaaattccacagttgacaagtgccctaatacctgttactctgttcaataaaaatcacctctacctattatcgtctcagggaattaatcttgctacctcttttttttttttatctctaacacttccctgtattttatcagtaaaacaggtagggggggatgataatggcacatatgtaagggtatgtatttgcatgtttctgcctgatatgctaagattgagtgaggccacatgaaaatcaggcccttgacttcatactcaaacacagtgtgttgtatctgtctttgtatgaatggacgttgtgtatgtgtacacacacacacgcacacacacacagactacagttatatatatataatttagtttgtatttctagcatttagcccagtgatttacacaattatttgcacaatagtaagcaggcagaaatatttgtttaattgaattcaaaagactcgagttccggcatatacatttgtaaggtagagttttgagaatagatatataaacataagtgtaaatatgaatataaatataaaaatatattaaaggagtttctaagacctccaaaaccagcagtttttataagccagagaagaatatttgtggggatttcaggaaaatcttatatttattgagttaaaattacatgccactcaatatgccactttacttatatcatcttatttaatttccttaataatcttatgagttcaggctgttgcgcattcccactctatagatgagagaccagaagttctcagcagttaagtaactttttcagtcatagagcaagtaaatgtaacattaacacaggaacataggtcctcagacattaagtcctagattctttacaagacagtggtgctggaaatagcaggattgccggagttatatcatttcagaatacttagggttctttaaggatgagaaacttgtatgctttagtagaaatgaatatactggtagaatatgggatctcacagaacagataaaaggaccatgaataggctctgacgggaagtggaaccagggctctcagaagtggaactaattgacaatctcgcccgggaatcatccctctaatgagtgtgctctgccattgcaccaatccctgcatcatttcactaaggttctgagtccataacgagcaggacatcttgactgatagtctccacaaactgtatacaatagaagaaaggggaggtatgtagttccccgaacaaaatccaaatacaggaatttagactgtgggttggatctgtcatgccaatgtaataacatcatgttaaatcctgatcttgttaccctatatgttaacactatctctctctgccttgagtctttagacaatttgatcatcctgctttctgttcgcaaaaatatctttgattaaagtattaaaaagaactggcataattacaggcaccttcaaaggccttcttctagattaatcagcatatcaatccctctttgaacgactttgtgtattggttaataattgatgcatctttattctttccatgagaaaatcttaagacatttttccaagaatgttaacaaaactcagttatttaaatttgccattctggtaaccctaacccaaagaaaatgaagtcagtttcaaatgactcttaaaaattatgtttatcataatgattatcattttttaatgtttcacttaaacagtctattgaataatctattctaaaatgttgctccatattgatatgccaaggttttgctccatattgagatgccatgtttgtgtctgcagataattatctttttcatactttttgaaatatggaaatcattttgtttttcttaagttctcaagtgtctctttatcttcatagtttttcaggtgtcagtaatagttctataaatatatatatttaactcccctgccaacacattaccacctgtgaaataatccaggtggtaaaattcatctgggaaacattgcatataaccctagttcccttttatatattcagactctaagaaagaccaccatgaagagagctttttcacccagcattttttttatgtactttaagttctggggtacatgtgcagaacgtgcagctttgttacatagttatacacgtgccatggtggtttgctgcacccatcaacccgtcatctacattaggtatttctcctaatgctatccctcccctaccccccccaaccccccacaggccccagtgtgtgatgttcccctccctgtgtccatgtgttctcattgttcagctcccacttatgagtgagaacatacggtgtttggttttctattcttgtcttagtttgctgagaatgatggtttccagcttcatccatgtccctgcaaaggacatgaactcatccttttttatggctgcatagttttccatggtgtatatgtgccacattttctttatccagtctatcattgatgggcttttgggttggttccaagtctttgctgttgtgaacagtgctgcaataaacatacgtgtgcatgtgtctttatagtagaatgatttataatcctttgggtatatacccagtaatgggattgctgtaacccagcatttttgagatgatttgcctcatgtattcatcagggttctctagagggacagaactaatagtatatatgtatatatgaaaggaagcttattaaggagaattgactcatgtgattacaaggtaaagtctgacaataggctgtctgcaagtcgaagagcaaggaagccagtagcagatcagtccaagtctcaaaacctcaaaagtagggaagctgacagcgcagccttcagtctgtggccgaaggcctgagagcccctggcaaaccactagtgtaagtctgagagtccaaagctgaagaatttggagtcttatgtttgagggcaggaagcatccagcacaggagaaagatgaaagccagaagactcagcaagtcaaccccttccaccttctgcctgctttattctagccgagctggcacctgattagatggtgctcacccagattgagggtaggtctgcctctcccagtccaccaactcaaatgttaatctcctttggcaacaccctcacagatgcacctgggaacaatactttgcatccttcaatccaatcaagttgacactcagtattaaccatcacaccttgtaagcttttcagtatcgtgcaaaattagtgttccaaggagcccatgtttgaaaatcagatttacattgctattcattaggtcaaaaatattgaatttgaatagccatgggctttcttgccagcttcttatcaataacaagcttcacttctttttcatgtttaaagattcttccctttagggaaaaggatggaagaatggaaacttaagttgtcctaccttctgtcaactgttaaactatctcccccactcagtggcccttattctgtgcctttcttggtcatattcttattccaacaatttatttaaaaataagcctatatagagcttttcacacacactttctttagctgtgtgatgagagttatgtttatcttatgagctcagacacttgaagtcaagccttcccagatcaactaaaggttgcagagaaggcaatggaaaggtcatttcacttagatttcctattgtcacttggatatgacctaggagtcaagtttatgtcagtcaagtaattatttctctcgagtgcctccactgacaaaatgttagtaaactgtatgtagttggagaactaattttgctcccagaagaacaaatcctttcttcacaattttttctgttgtttttaaaatggtttatgctataggttgtttgaattctgtaatcttgctgggttttctaaactttattaccactcccttttaaaacattctgctaaacaattgagcctcagtttttgttcttgacttatgtgtcttttccttatttatttggaattttctatttaagtgtcattggagacctgttttaaaaataaaagttcatcaatatcataaacagatatcactgatgagctttgtaaacagtttttgcctcacaaaaattaatgtttttaaattggatacatcaagtgtctgaaagcagaatgacctatctatatcactcatctccagaggttccaaaaaaacttcacatcacatgaaacctcacctttatagacggcttttatgactccctcagtaaccttatctttatactcattagaatttctgtggcaactgccaagccagtgtcccagggctgaaaagcaacaaaggagaagaaggaggtgctggtgagcctggaaagtatgattccatggcccggaaggtgagaagcctggctgaatgtttacgatccctgtgggttacatgtagtgcatcctctcagttctgttcttcctctgtcttctagggtgatatagggccacggggtcctccaggaatcccaggaagagagggaccaaaggtaagaaattctctcctccactttcccctgtgggaacctcaatttagtatgaaaaaaagaacccgatttgaaaatagacaacttttaaaatacatactatatatatatatgtatgtatgtatatggagagagagagagagagagaaagtgatgtaaaagtcacttgcaaatgttgccatttatttgttccctgaccctgtccaaattacatgccccaagtgttcttagaagagatttttttcatttccaaaagataagaaaaatgattgcatgtgctagctgaatgtattgtctttttagggaagcaaaggagagcggggctaccctgggatacctggggagaaaggcgatgaggtaacagattcttttctgattatatagtcctaatattgattctctttacgtggctcaacagagtaaaaatgttaatttttctatagctcagatctgatgctataaccaataaaaacaaagaccacttagagcttttaaaatgctgacagattttaaataacatatttatgtttattaccaagggtccggttttagagacaaggaaattaaggcacaaagttaatatgtcagttataatttttctgttttcatttaacagataataattccagctctctcaaaataaaagtaagggaaaggaggaagggaaaatttactcaaaagaattccaaggtagctaagagatttaaaggaatagtagttggacaaccagcctagcagtaagggcagctcaagaacccagcagagcttccctgggtaccactaaactctgattaaacttcagcaaccttggattgtctgtgtctttgctcagctttcaaattcttgggagaaaaaaaaactgtcagaaaaatcttcttgttctagtttacatcagctgctcacccgttggactaaggttccaagtccaatgtgcttttgagataatggtataattttctgactgtaagccatggtgatgctcaggacatcatttttttcttacataattcacattaactcttagaaaaaccaattagaatgatgaattgctgttagtttaaacagttttgatactactaattcttaatgaaagtaagtaagccatctggcatatattaaccttgatgttattgtagaaaatcataactatataaagaaaatctatttttctaggtggagttatattttacattaccagtaatcatcatgtactattgtttctaattaatattgcttgtaatctagaaaactttgaggtttgattttttcccaagttaaaaattgaataccaagtatattcaatatttattttcatccataaataaaacattatcttcaaaataagttattgtgcttttgcttcctcatgttccacagaaggttttactaaagtacaagcacaataactgattttcatagtccaacagctttgaactacctccacccaaaaggtaggctttagaggcaattgagaaggtaataacaaaaagatcaggaaataattggaattcaggttttgtataagtaactctaagttaaagtcactagaagttaattttcattgattctacagggcacttttctctcttggtgaactgaaatccattgctaatattcctccacactttagcgggctttttcttcggtacccctcataaattctgtaacacagttcacaaaattgtacacaattctcattacatggggagttccagcaagttcaggagattcttttccattgtttcttcacactacgtgaataatatgaataaatctgaagtaaactattgactcctttaggccttgtagggggaataaggtggtgcagctttttctttagcagatgggaaataacggatataatcttgtcttctacttggtctcagatattatttgaaattacaatttgttgatttgtcaaagtgaataaaactttgaccaaaaacaagtgcatttccaactggccaatgaactataccatttcaacatacagtatggacttgagatctaatcttatgaaatctcaaatgtctattgtactctaagtggaaaagatacagagggacaccccatctctttgagacttctaattattatgtctttcatctgtttggaaaatgagagagaggagttgcctgcttgtttgttactcttagaaaagcaacattttcttccacatttttcacagacgttgttgcacagctcaaggtagcaacttggaagatgctaatagaacacatgctaacctttgatggagtgatttcttgcttgaaatgcaggtcttcctataatatcttgggataataattgataaattagacatgaaaaatatcatcagccagatattatagcaacagaaaatattcttggtagcaactgagctaggatttgcaaaatgaaatatcagagcagggtaagaacatagctccaatggtctccaaatatctctgcaataaattttaatttgtattttagtttggcactgtatgttaaattgactgtcctactctttaatatgtatttgtcttctttaatgatcatcttgtcttctaaaattatcttattgccctttatgcatccatagtaactttcacttttactacagaatttcagctttttcagagaaaggctgatgggaatgattttttatttatggactgaggtttattttaaagtttaatgtggtcatcaaaggttaatgaatcccaagcttataaattagactatctaaaaactcactcaacatctctggactgattcagtgttgagactaaaagtagcaaaaaaaaaaaaggaatacatatatacgtatattttatgcatgtacatatagaaagaattttatggaaatatgggtattttgaggtaaagaaatttatggtataacatttataatctccagtcatttagaggtgccattatcaatgaaaatttttttactttgcatctataaacctgcatacaagttaatgttaggggaataaaaagaatgagtaccacataccgatatgtagagcctgcacatgcacacatgcccatgtatacacacatacacatacacacacacacacacacagcactgccaatgagattgataaaattttgaagaaaaatatgtcaacattctttaacaccaatacacacaagatttggcccaagacttatgaggaattctagcatgttcaagtagaatttttaagcccttcttcatatcatatcacatgaatagacctgaagtaacacatgatgccatttggcattgaatggacaaacctagaagaacttggtccttgatcccactgatgcaaagaaacttgatccagctcacagtcctatagaatgctgataatcaatatgcagtaatatttccatggccacatcatctaatatttataaagtatatgaaaatgcatatatcataatagtaaaaggtaaaggaattgtatgatgacaaagaatggtatggcaatccagaaagaatattttactcagtaaaggagactaaatcctgaaagaatggaatcattcagtctagaacttgatgtatcacatggttatctgaaataacaaaagcatattttaaaatagttttttctcataatagaagtgatctcagtccactattgaaaattgggaaaatacaaaaatgcactaaaagataaaatttctccctattcccactacccaggagggacttctggcaatagtaatgtcatggtccacaactctattagtccattttcacactgctataaagaactttcctgagactgggtaatttataaaggaaagaggtttaattgacccacagctccacgtggctggggaggcctcaggaaacttacaatcatgacagaaggtgaagaggaggcaagcacctttacgaggcagcaggagagagagcaaaggaggaacttccaaacacttacaaaaccatcagatctcctgagaacttactcactatcatgagaacagcatggggaaaaccacccccatgatccaatcacctccctccctctacatgtggggattacagtttgagatgagatttgggtagagactcagagccaaatcatatcaacaacacctcatctataaattccaaaaccaaagcctctgaaaaccctggaaatgtttcccaagtttggctttgtttcccaagcaaattcatttggcagcccaatctggcctaactcacacggagcttgtctattccactctgtcagaatatcatgttttgccacagaaatatttgtgtgtttattagagggcactgcctcaggcaccactgcagtgtgatataatattcagtatgtatatcatgttacctgtgaaatgaagtgataatccagaattctaaaacacatctaacactaaagtttctgataaaacttatctatttgtcgtgataaaataataaaagcctgtatgtatcattcccatcttttaggaagtacatttaaaattgtttaaaaatttagaccctgtgctatataagatttgtgactttatttttacatgttttctaacttttttaaaacatgattttaataattgcaaaatatttcatgttataaattgtatgtaatttatctaacaatattctgttgttggcaaatgtatcaaagtaacaaaactaattacataagttagctaatcttaccatttcttccttgatatataaatgtatcagcatcttaaatcctatccggtataattagtgctattctacaaatctaaggaggggagggaggggaaatctattcattattatgcttaagccattaaagcgttccaaatttaaattcaccagtgagccaaatttcttcttataataaactgacaagctaaaataaatattatatcataaaacatattccatttttccctagctgaatggagcttaagtgtaatcatctatttcttcaatggcattctgccaatctaaaatttgtatttccatgttttaccagtacgagattcttagatactactgctgacggagtggccctataaaataagaaatgctctatgaatcaccagattaaattatgtttgcttcagattccatgtcatggcattttagctcacccttcttactctttaaaactgagtattcacacatattcttacttataagtgagggctaagctatgagtacgcaaaagcatacagagtgatataatggacgttggaggcccagaagtgaggagtataggcgaggtgtgaaggatgaaaaactacctattgggtacagtgtacactacttgggtgatgggtgcactaaaatcgcagacttcaccattatacaatttatccacataaccgaaaatcacttgcacccctaaagaaaaatttttatttttgaaattaaaaaattagaattaaaaaagtatatttgtatatgacaaacattatgtttctcgattagctaaataagtgtttaatgttcaatggtcaaaatatttgattaactaaaatgccttcttcccaatgatataacagattttatgatgggaactatcttttccagggtcttcaaggaattccaggcattccaggtgctccaggcccgactggaccccctgtaagtatttgttaaaacgattgcactcacagcttatatctgctggtttgatgcaaggtgaattaattttcttcattgccttttgttctctgtgcctctatgtagattgtccagatattgcctggaaaagtagcctcatccaagctctcagattttcatttagtattacttaaggctactcagtgtcctggggacttgcctcagaattccaccagaccagaaagcagtctgcgattaagctagtgtgtttgaaatagaaattgcatataaaagagcattctattttttatttataattttttggcactaacctttagaagagatagtcaaatggcaccacaaactgagaatttattttctaaaggaaaaaaaaagtgtgctaaggattatcagatttcatttatttttgttcctatgtataaattaaaatacctctattttagtcaaggctttcactgcccctcaaacacaccatcaaagccttcgtgtctttcactgtcttgttttcctagaacagaatctcttttgctttatacttgccaaacccaatctctcattcaaacagtttaattctagagtcatcagataaaatatagtgcatgcagttaaatttgaatttcagataaacaaataattgtttaatataagttcatcccaaatattgtgtttttatttgctaaatctggcaacccagcacatgcttcaacttctccacctcatcctttcttagagttcctatgccaatagagtctttaccacaccagtaggaatgtaattatatattttaatgttctgaaataaggattttccataattaaagttgtgtcatttatgcttccgccacagttatacagaacaaacctggctttaaattgttcactaaaattaaaaacgatgaaaaagagttgtgaaagaaaccatgaaaattatagctaactctgttcccaaaggattaaaattaaattttatttttcagtggtaaaatgcagatcatagaactcaatatgcacactgttaattctgccgccttgaagtatttaaaatgttgatccctaccaaaactatagctcatttagaaaggcataatgttatgtaaattgccatttaaacagcaagactagattcttaagtgtatcaaaaggttccaattaaggtcattaaatgtggttgacgaaggtgaaaaagcgaccacaaatacaaattttacccttccaagggcttatcagcaggatacagctgctgtatcagccagaagaaacataagcttctagggcttatttaattaggatcaaatgaccttcaaaatgtgtaagttttagtaaccaacttccaataccctttggccatttaattgttgtttctgtaacaaacttagttttgtgttttacagggcttaatgggaagaactggacatcctggtcccacaggagcaaaaggtgaaaaggtacaaaggaaaagcctcacttaccatccaaactggggcttgaagtgggagcaggatgagactcttcacagagagagccataaaatcaagcaaagcctaaaagtagaaatgatggtagaaagtacctattcttgtagtggatttggaagaacacaggtccaaaggttattctaaacacgggagatattttcctaggagaaaggataaatagaatattggttccataaaacaaaagttcaggctggattcagaatcctgggcaaccatctatgtggaaggattgggtgggggagcctcctggaaggatgcaagtaatgtggtgtctaccagggagttccagccacaggggctgtcagttttctatgacaaaataccatagacggagtggcttataaacaacaaacatttatgcatatttctctcagttctggagtgtgggaagtccaagatcaaggtgctggcagaatcggtgtctgacagagtctgccttcttgttcatagatgtcacctactagctgtgtcctcacatagtagaagggtgaccaagctcccttgggcctcctttataagggcactaatcctattcatgaaggctccaccctcatgacctaatcacctcccaaaggccccacctccaaaagctccagacagcagactggctctcaggaccaagattctggtaaccaaagagcttgcagagacagtcgagaagttctgtccctagacggtcatgggggaaatttactgaagaaccaggatagcttgtttcctggggagatcagttattggacagatgggttgccatggtcagaaaggaggaccagcattagatgagtctcagacaggacaccacacagttttacatgtttaccccatttaagatctaaactggctctattgtactagtccaggcagatccagcaagtaagtggaataagcctagctatttagatcggggaagtaagaatcaagagtccacatgagccactcaagcagcttccacccactcgtcaggacacaagttccctgaccaacgtggaacataatgacatcaaggagcaaaggaatcccaacacattttgaaggaaacaatgactttattctagatagtctctgcacatttttttctgattttatcccaaggagcttgcccaaccccactagccttttttctctgttctctatggaaattattcagtcatagacttgcctttgaagttaatgggaattccacactgagatgagctttggggcacaaatgagagtgaatatatgacttttaattgtgccgggggaaaaaaaagacttttcagtaggcacatatttttccttgtttgttgactcattagaactatgacataattctttgaaggacactgccagttgtcagcagaatgtgacatgtcttagagagatagccacatcaaagcagtttgggaaaagaaacaatatgcttgttctttgttatatattctcaggcagaagcattgcaagaaaaactttacagtttatttttattgataaacatgaacaaaagattttatgatactttcgttacaaaaaatggcagggtattggaatgaagtccttgattacatttatgggaatggactaaaatccctcaaaattcttggacattgtgagtagaaattttactctatctgaattcttttttaattaaccatgtcttgccatttcccctgctatagagggacttaagagattttatgaggctattattctgagagaaaagcagagttataggaagaactgctgagagacaccagagggacttcaatagctctgcttattatggaccgataaacatctatggtttataaaaatagaagtgaaatacatttttcaactttcaacttgaattcattttcacaaattctattttcagtctgcttctcctgtaagtctaagactgtttaaattgtagtgactatttgctttaaacagtactataccacagttgcttctgctcaggaagatgtgtctgacttgggtgtaaagtcagatattaacgtaggaaatggaagatgaagtttccctcctgcagacacaacacaggttgtgatttttttactttcgtcaaattatgtggatgtcccctctggttcccaaaagatgaaggtggtagaaatgaggctcaaagtgaaggctgactcagagccacaatcccagagcccactgcctgcttgtaggagagttccacattgggagagttcctccagctgcactggaagtccaggacatgagcacctgggttgtctggctccatctaaaaataagcttcgtttctagagctcacacagtgagagtcagaatgggtatgggaaaagacctttacctgtcctgcggtctagaaatgtatttcctgggtaaaggagagcccagctgaataagactacaaggctgaaacaacatggcaagtcatatcgatttcagaagatggctctgtgattaatttcagaagatagtttgtaaacctggggtagaaacgtctacgccgctgatatgtctatatatcccttgcagggcagcgacggaccccctgggaaacccggaccacctggaccacctgtgagttgttctaggcttaaaatttaaaattcatgtgtttacttaagacttttataactcagaggtaagactacatttagatgttttcaaagataaaagtcttctgaatttcgtgtataaatataaatgatagccaatgtagctttaaagagacctgatttgttctccctttggttcagcctcaatgtgcaatgctcagattggcatactgcgggtctccccatcttggatttaggaatctgggtttgtgctccgactctccacttcctggctcggggcccctgggaaagtcatttaaccttaatgtgcttcattcacagaaaggagaagggccagaaaaatagatcctttccgctgatgcgagttggtagaaaatctgatattatgctatatgtgttcattcccattcatgatgtctgagatgcaaggaaactctatttatgtagctcttagtgaacaaaaagtacaagaggcatcgatgttttcattattgtgattgagacagatgcacgctccgtcagggaaacggtggagaggagaggagcctctctccgtggcaagtctgccctcatgtggggccacgctcgaatcgcagccgagccgagctgagatatcacgcaaaacacccttttctaccccacctcacaggaatactttaagaaaccaaactcaccatagaaagggcagaattgaccgtgactttccgaagacaatgaggattattatcagtctgcgtgcagttgcatgctttgtacacgtaaatgaagagattagcactctatttcctaaacttgtttcctaaatctgttcatctgtgttactgaccttttcccttgacaagaaagcaggacggaaagtattagggttcaaatcctaaaattcactccttcccccgtgggcagaacagcaaatataacatgagttcatgaaagggacctataattttataatgcacttaagatgtctttgtcttccctctgaattctccaaaaccatccatccttcaaaacacagtttaaatgttttcttccctgggaaacctcctttggaaatctcagatgaaaatatcctttgtctctccaggacgtagcacactaaaatatggcagacattcagtcgctgtcagataaatgagttaaataatagagtaataaatggatggagcgtttgtcttccatcactagtgtttggaagatgcatgcaaattgtcttcacagaacactactggccaccatcatacagaaacaatgaaacagtgacttcttcaactctgcaactgatatgtgaaaactgcagaaaggaaaaggcagatttgactattgattctatacaaatgtttaaaaagaaagacaaaagattctaactaaaatttttatatggaaatttttcctaaatgctaaaatgtatgatttttttaaactatagaataagttctcctttaagtgttggttactctaggacatgtcaatttttttcaagatgttcttattctcttttatcctaaagaatttatttttgtagaaacatccacacagggttgtggataatgtcatctccccatttaccttaattttctatttggtatgaaaagactgtggaaaaaaattacttttcagtagccaaattgttccctattcacatcttcatcagcactatggcattatagcctgcaggttagcaggctgtaaacagttagtataaattgacaattcagaaactgaattttaatgagcaaatattttcctccaaatgcattagtgtctcatctgtcaaacctgaacattaattaaaccccaactgaaagtatccgtgtgcttcaggtgtagctcacactcccttttcatttccctgcatttgctttggaaaagctaaaaattaaaatgtattattttacttagagtattaaattccctttgtaaaatagaatagaaaaaagtaaaaaatagaataggaatagtatcatttggtaaaatgataaaatgtagagatgcaaagtattaacttccaagaataattctgtatctcacctctttcctaagggtattccatttaatgaacgaaacggcatgagcagtttatataaaattaaggtatttatatttgtaattatttaaaatccagttatagactgctgtaaattcgtctcatctttctctttttcttttcttttcattttcttttgaagggaggtgtgaatgttcccagttacccagggccacccggtcctcctgtaagtacagttgtttatcatcaaacacactttagctgaacaaccacaatgaaaaacaaacaataaaaacctcttaagttcactgaaaaacgcatgttatgaatacagccaaattttacagcagaaggaaataagtaaaaccaattataataaaattgagaaaatgtatgcagccaaaataatggaaaacagcatttttcatggtggtgtcacttttttcattgcaaatctaagaactaagtcaatgtccaagcaatcatttttatgaaatttccatcaagttatatttattcatcttattcttcaaattcaaactgtaattaaagcaaaacttgctaatattcgtatgtgtattaaggcaaattggacaacagtgtttcttattctgtaactgctttggtcattatttgaaaaatgactttccatgtttctcttacagggcccaaaaggcgatcctggcccagtggtatgaatgttcccatgttttgtgtcatttagaatattggtctttgttaaattttgaaagaaaagcatcgggcaaaatggcctgccttcttaggtgttcatcaattaacatgctggtggtgacaagcaggccacaatataaatgccagcaatatgttctctgtttctgagatgcattagtcctgatgttgtcactgcccttgaggtttgtctctttccgtcagtgtgtttttaaaatcatcctgtgatggaggaagacacatataaactctgataaatggggcactttcttctaatagccctcttctgataattgattcaattttaagtagattgtggaagagaaatacttactggaaagaaatcccttaatatatctgccatctccccaacaaaaaaaaaaggaactgtttatttgctttaaacgtcttaggcaattattttgcaggagatatgttttgtcataaggctgcttattaggaggaatgtatcaggaggttatgctcagcatggaaggagatcatgtcctccagccgcctaaaggacgataattgttctcagcatctttctgaaccatggagcctctgtaaaagttctgccaaattcaattagatgccctttattgctgggcattttctcctgtcatgtctttttcaagcatatccttcatgtttcatttgtatatattttaacctttgggtatatacttgaaactcaaatgtacctaaagctgaaataaattttcaaaccactttccattgccatgtgaaaaaaaatttaaagccttttcattatagtacagtttgttaaaactcaatgaataaattttaaaccagcaaagggacaagtcataacaagtaatgtttttatgtctaaaaacatattttaaagagatgcattaaagagctgtttgattttgttattgggcaatatatattaaaagccaaattgttatcccctgaaagcattgtttcaactagttaggatcatattctgtaattcagtttcctttgttttactattcattcaccctgtctaccctatctttacctgaaaccaactatacgcttcattctaattttaattttcttacatcttgttgataaaaatttcctcctggtctttccctctcatactcatacacacaaaacagcttctctgaatcatttaaaagcacctaggcttctcactgactttttgggaacattctttgaagttcttgcattaataactgcagattaagataagaactttttaagtattataataaaggataaattataatttactggcattgaaaaggggctggcaacaaaaatgtagacctatttgagtagaatttgaagagattagtcttcaaatttcttagctacaacaaaggatgaagaataaaaactgattgaagtgtgttccttgcttttagagatgtgaattgagtgagtgaagcacagaaacagaaaaatgcaatcatgaaatgaaatacacatttagtgtacacattcagcctcatcctggatgaaactttgaagttactcttttgggttctctgtcagcaccaccctgcaactctcatcatctcccaccagctgtcctgtagggaaaaataatagttcctgccatagaaataatccaggaatgatagaattgtagatcacagagcaaaaacttgagaagtctttttgaggttggaaatttactcttccaacattcttcaaatcccatgacaatagacctgcctcactatttctaatcttctccataaacctttctagaggaatattacccttaattgaatttattatcttctgaggcgctccatttcattcctttggtattcagtttataaatgatgtttaattaaatatttaattattgctactttcaaacaaatgttgattgattgagcacctctgtcttaaggactgttgagaatgtaaacaaggagaatcaaagagtgtgtttcctttgtcagcaacctagggcctcttatacagaactttatgcagaacagaatctgaacttttttttttgatcagttgtcaagttacatattaggggacattttaaaagatttctgaaacatagaaagcatatcagttcatatgctcactcactaagtattctgtaataagggcaatgttataaataataatgaagttatatccctggtaatatttttgaagcagattggaattatgtatgcaaaaacacacttacagagaacacaatttgaaagctcttgtttctttgtgattatgtctaaagcatccggtgtcctaagaaaatatttgcagtgaacattaatttattaacaagaaggcatcaaacaactccccactttatctcttttttaacttaaagccctaatgcaagcttgtccaacccatggcccatgggctgcatgcagctcaggaaagctttgaatatggccaacacaaatttgtaaactttcttaaaacattaggagatctttttgtgtgtgattattttagctcatcagctatcgttagtgttagtgtattttattggaagacaattctttttcttccaatgtggcccagggaagccaaaatattgaacaccccttccctaatgctttttttgttcagagttagcaacttccttcaccacagcttttcccaaagtgtttcttgaggatctacaggctccagctagcctgggaccatacactagaaaatgtaaagatttttaaaaatagaaaacactaatctacccccttccagtgactcatcaacttgagcaataacttttagtgttattggagataatgatcctggggtcaacttcttaagcattcacaattcttgtccagctgcagagaatacttaaagatgataaacactgctttgagtgctccatcttcatctactcttaaacagtttattcttattctctgaaaatctagcagcaccaggtagctcacaaattggcaaactttattaaagccccatctttcattctagttcttattgaaattggagttatcactgagtagagggattcattctgattagattctcaatcagaatgaaaatgattaatcagaaaatatacctctctggagaatagcttttattctcaaactattttcaaacatcaaatgcaataatacattacttaaaaatagggcatatcatttccttgctaaattacacatcaatgtttggggtgggaaggttaagcaaaaaaatctttgctttggaaaccaatgcttaaaaacattttgattattgctcctgcatttcttatgttcatatttaacagggagagcctggtgcaatggggttgccaggattagaaggatttccaggtgtaaaggtaagcacagaagttagaaatgtgttcatttattcaacattcaaaattgtttactgagcacctaatgtgccaaaaactgttttaggttagggatatataaaggaacaaaacagacaaaaatgtatgtactcatgggacttacattctagcaaaaggatatagaaactaaaagaataaacattttaaaattacatcttattgttggggctatggaaagaaagaaaaagtagaatgggttaaggaggatcaggaatgctgacggggtaggagggcagtatctgagcaaagacctgaaggaggtgagagggagagccaagtcccctccagtctggaggaataatgttccaggaagaggaaacagcaggtctaaagagtctgagacataagatttcctgatgtatccaaagagaccaggggagggagtgaggagatagtcgtaggagatgaggtcagagaggtgggggtggaggtgggaagtggccttgtcatatagagcagtactactcaatgtatagccagtggagaaccagtgccagtctgcagaccctttgttatgggttcagtggcaaggttattacagagactgagagtaagcacctaaaaacatgtccagtaatttgtctaaaattgtctagcaagcatgtgatggtagaattatctttgttcatgatatgttagaaaataaataaaagattgctcttttaccacaggaagtttgagaaacactaataaaaaggcttaacagctattgtaaggcctttatctttcaatctttgtaaaatgcagagccatcggtgatttctgagtagtggcatgagggaacttgcagccagagagttgcaagggtggaagtagggaagccagttagaagatatccagtaatccaggtgccagttgatgctggctcagatcagagcagaaacagtggagatagtgagaatgcctggatttggatatattttgaaggtagcactgataggattttcagattgattgcattattagagaataaagaggagtcaaacacgaacttcagttttatgacctgagcagtttgcaaaatagggcggacatcatctgaaatgaggacagctatgagcaaggcctattttgaaggggtggaattatcaggagtttaattttgtacgtgagaccaaatttggagatatctgttagacagcaaagtgaaggtattgagtaggcagtctgatataaaagtaaggaatgtggaaaagaagtctaagtggagatataaatttggctgttctaagcatagagatgctgttgtaaagcggaagactggataagattaccaagggaatgccaatagagtttttagaaacagaagagtcaaggattgagccccaaggccctccagtattaggagatcaagaaaaggagcaaagagcaaggaagactaagaagtaaccagcgaggtaggaggaaaacttggtatcctacaatccaagagagaataatgaatcaaagggaaaggagtgatctcctgtctcaaatactgcaaataggtcaagtacaatggagatggggccaggtagaatggtcaagtattgaacattggatttagcaatgtagaggtcatggatgaccttgaccagagaaattattatttcactatatggtaggaacaaccgtggacttgaatgggtttaagagagaacgaggaaaaaaaatagagtcagcaagtcagtataaataatgctgacagagttttgctgcaaacggtagcgaataaataggccagaggctgctagaggaagtagggtcgaggttttataagatagattttgaagataataaaaatatcagactgcttatatgctaaaggaatgactcagtagagagggggaagatggggatgatgatgctggagagaaaggagagagtgctgggccaatgtctttaagtagcctagagggaaggggacctagtgcatatgtggagggtttggcttcagagaggatagtttatctacagtaaaaggggagaaagcagagtatggggacagaggctgataggtgggaagatgtattggatggagtctacaaaagttgttttctgattgcttaaattttctcagataaagaggaagcaaggccattaatctgagagcaaggtagggtaagaggttggggagaaggtccatagttcagggaccacagaagtgtgatgactgctcagccctagggaccctcttgaggttcatggtcatgaactgaagtgagacctctcaacaagactatgtgtgctggcaaggcacagtggctcacgcctgtaatcccagcactttgggaggccaaggcgggcagatcacctgaggtcaggagttcaagaccagcctggccaacgtggtgacaccccatctccaccaaaaattagccaagcgtggtggcaggcacctgtaatcctagctactcaggaggctgaggcagaagaatcacttgaacccaggaggcagaggttgcagtgagccgagatcgtgccattgtactccagcctgggtgatagagccagactccgtctcaaaaaaaaaaaacaaaaaaaacaggactacatgtgcttttccagccatgttcagacattcaggtaaagacacagaataggaggggagttggatttcaacaatgttctgcttttgacggtgagtactggacggaagaatgggaaaagacccttactggcttactggtatacacaagggaatgattctaacaagtaaccatggaattttaactaggcaagagagagggagaggccattgagggagtgaaagataacaaatttgtaccatcaatggattagggtttaggggttcaaggtactcaaagagtgaattagaatgatgtggaatggtggtccaaagttggaacgcatgaaattgagattatggatgggcagcaaatatttttactgacaaagtgtcaggtgtaactatgaaaataagaggtaagttcattcgagaatagtggttaaggaatgagaggcatgagacatgcaaatatttcattgaatgaaaagttctagtatattaattttaaaaatgaaaattttgtaattcaaaaggaacagagggaaattgatgtgtattgcctgtttatgtcctttacccatttttctatcagttatttttttctttttgatgatggctatgctccatacgttaaagacattacttctatctcatgtgttggagttttcatcctagttgatctttgcctttcatttttacgtttaatcttattgtaaatataaccttaatgtagtcaaatctaacactatatttctttatgatttcttgttttggttttatgcacaaaatgacttctacttttattttcaaccaaaatcagaatgtcactaatatattctttgagctcttttataatgtatattattttatttttatataaatctatgtggaattcatatgggatataatgtaaagagaagaagcaaacttttttcaatgaaattatccaattattagaactgtttgttaaataaaatcctattataaatgccggtctgtttctgatatttctgttatagtattttgatatgctgcttaatcttatgccaatattccattatagctttatttattatatgtttaaatgttggtattactagtatctctttattattattcttttaatttttttatcctctcagttattatcccaagtaaactttagtatcatttgatcacactgcaattttgtaagaattgcattaaatttataaattagtttagttagcaatgacacctttacaacattgtcttgctctccaagaacagagcatatctcgtcattcattaaatcaagccttttatgtccctgagtaaagttttttaaattcagtttctgcccccaaaaattgccattttattatcccatatatatagtcgttagtatttttagcattgtcagctttatctaaaatatcacattggctcttaaaaaggagttgagtcactctgttgttcagagcaattcaagggatcttctaattggccaaatgagaactacaaatcattagttgtagatcattttattctaactctatatccaatgagacaaggataggaaaagctttttggaagacactcaaagtgcttaatcttttaagcaagagtaatgatcttttgaacatgtagaataaaaatattgactaatttaactataagtatgtaaggggacattaaaataggtcacagaaatgattatgcttgctttcattaaaactattatttactttagttttatggaaaataaaaaagctgtaacgagttcagttgtcaattagctactcagtttgctatttttccatctacacactagcttcaccccatctaatatcaataacacttatcagatccaaaggaaagctttaccaaatccaaattattatttgagaattaatttcataactaaagacttcattgatgtcattaaagtagcaatgtttttaaatcccaacagggagatcgaggcccagcaggtcccccaggaatagcagggatgtcggtgagttcagattacttcacatcattttcacaggtaaacggttctatctccatgatacacctgtggccagggatcaagacaggcaggagagcataccataactcccatggcattaggttcctgacaattctagtttcataaataatgccacctgtattttccacctccacaatcctctatttcttttgttttgttttgttttttgtcctcttttattttcttcccaagtcactttcatggaggggagaggaaacacagttactatacattaatttatgagcacagctttggaaagtttattgtgtttctctattcttgtcatatttcaaggtttctcagtcttcaaaagacagagttcttatcctcaggcatgtacttcaagttccttgtattaatgcaatctgcctgagttattccttagcccagtgttattagcagagctttattgctgctaatgtttcctcataaactagcccttcaatcctctcaatcatttttgttgctctctggtgtcaaatgttttaatctcatcaaggccttttcaaatgaataggaagtgttccaggaaaggttgaaattatttctctgagccctagagatcattctgatcttcattcatgatgctctaattaaaattttgtggtcacgctttatgaataagaggccatttatcctcttgctaggtgctcctgcagggcaggtccaggataacattacaggaaagtcaatggaaaccatgggcttgtatcacaagaatataagaaagataagataagataaaggccctacaatcaccacccacagtcacccaccgagatctactgacacccaacaccacccaaagccctgctcatctcccactgccatcccacaaagtgctcagagccactctacttcactccattaacttctaacaacacaaaatagagccccatccatcatctgcatccttcgtagatgatgacattcccttacttagccattatagatcaagtcaaatattcgtatgactgtaaaagtagcatgaaaatatcttctttggaaagctcttccaaattttttataaaaggaagtattcttgaaagttgactacacacttaattctattccctcactactgccccactcacagccattcccagcaacatatttggaaatcagtttctggaagtgtccttagagaacctttacaacctgttcctcttatactcacatcctgtgatttgaatttttgtttccttgtgataaaataaagtctagtttttttcattgtgttcacccaggtgtgtctacaaattacattttgctattaccctaaattaagcttatcttctaggaaaaaatactggccaccattgcaagtatttaaaagatgtgcaacagtggccacaggcaatccaaatgagaaattccaaatatgtttttcaaagaggaagcattattgagataaggggctagcctgccacttagttggatgtctaagatctgatatatttactaaaaaagcagttttcatatgtcataattaaaaacattaactggctaggcatagtggactcacacatgtaatcccagcactctgggaggccaagatgggcagaacacttgagcccaggagttagagaccaacctgggaaacatggcaaaactcttgtctctgcaaaaagtgcaaaaattagctgggcacctttagtcccaactgcttggaggctgaggtgggaggatcacttgagcatgggaggcaaaggttgcagtgagctgagatcgtgtcactgcactccaaactgggcaacagagcaagaccctgtctcaaaaaataaaataaaataaaagcactgactgacaattacataaataagaaagggtaaaaaatttacatactacaaacatgttcagttaaagatgcatgttagatttttataactggcccttctgcggctcagaagataaaatagttaaaagaatctagaaatagacaatggtgatggctagatgacagtgtgaatgcacttagtgccacttaagtgtgcacttaaaaatggtttagagggtaaactttaggttatgtatattttaccatgataaaaattttttttcgaaaaatggtgattgttctagttgaagcagggctggggcctgcccacacagagacactggtaactcagctgattaccaaggggacccaatcctgctcttcctagaacggaccggtctatccctttcctgtatattcagggctaaccagggatttcccctagagcttctttctttgccttactctgaggaaagcgtgtgggtttacaggaagaagtgcctgtgagtgctggtcgtggggtggggcctccggtcagcatgctctcccccggatgctctgagttctccactggtcctacctgaccttaggaatgacttccatcaatgtcccttatctctttgtctcagatctcaaggcccgagccctctatacccgccatgtcccacaataagacccttcaggtcattggccttctcagctctaacacatcttcccactcaggcccctaacaacttcagcacaggcaagctgtggggacccagggatgctctctctaacttctgcctgcctagctttgccattcagcaccgtatctctacctatggagggatctccttccggaattctaagcagcaagttgaaaaaagcccatttcttttcatatttctccaaaacctacttggctttttcaggtctcagccccaccacacctacatcccacgtcgtctatctttcccagccacattagaccaagggacaggaggtggttccttctcagaggcaaccaagccttgcctgcacactcaggccttgtgtgcttccagtctccactggaccgtctgcccctctcgtccctcgctgtggtctgtctgctccaggatcggtcatccaagccatggtgtagtgacacaaacttatctgtttcttttcctgtcaacaaaacatggcttttcaaatcaaacatgattttttcaggttgtcatactatgaacttaaaagccctcttgtgaatctcaaagcctagaaaaaaacttatttgatgctttgtgcccatttctccactcccaaagtaaagaagagctgccaggaaaataagcacaagagggatgtccaataatgatgatactttgggctaatattttcaaaaatattctcctctcctactctccaccatccacacaaatatatattcgaagaactgcaccccagtctgaaacttatggcctgcggagttgactatatgttccccagtctctgtccccttagaaatgccactttatttatttatttatttatttattgagatggagtctcactccgtcacccaggctggagtgaaatgtcatgatctcagctcactgcaacctccgcctcctgggttcaagtgattctcctgcctcgggctcccgagtagctgggattacaggcacgtcccaccatgcctgggtaatttttgtattatttttagtagagacagggtttcgccacgttggccaggctagtcttgaactcctgacctcaagtgatccatccacctcagcgtcccaaagtgctgggattccagacatgagccaccacacctggccagaaatgccactggagagcatcacccttgggagcactataaactcaattggggttgggggaagagaagcatatggtgtcgttcagcaatttggctcctaacatttctcttcaatttgccttgccagggaaaacctggtgccccagggcctccaggagttccaggggaaccggtgagttggcagttactttcatgacagttgtacttgtgttgtacttgcatgcagttttaaaacatttgttggcaattaatttgtgtctgtggatgtgtttatagggtgagagaggacctgttggagatataggtttccctggaccagaaggaccctcaggaaagccagtaagtacttcttactacttaaaatatgccacctagagaaatgctctaacattatctcctcatctaccacctcagaaattctgagatttgaataagcagtttccaaggagtaagaagaatgcacagatggatttttgatggcaagggcaggagttcttattgagttccctagatctgtgtgtggtatctttatgtcttaaacagtgttgaaaatggtgagagttttaagtgtcaggaaatctgactcatcatttcttaagcctaatgttctcaacagacttaaagaaaatataatggcctgtcatgtcctaaagtataaagaaaccaaagacttatagatataatacctgtatgttaaaccaaatcctaaagtagaagttattttctcaaatttcctcctttgtatacaggccttgttttcttacactttcataaatcactactggtgaatgtctcatccccttgtgtcctaaaagagctcttggttactgatctgtggtattgatgtgacattgtaacaatcattctgactaatccagttccacataaattcatctagtcactgctgtttgctaagaatgtgctgggcccttagggaggggatctaagatgaataagacagatctcactctcagagttatcctttacagaaggtcactgctgatttgtttgctgtggtgtgtatgggaaagaagtcgaggtgaacaaacagtgcaaaattcaggaagccagtttggcacctctgtgaaaccttcagggttggtggccaccatttcctcagagaagacatgaaaaaaatgtaatttagagtcaggaagatctgggtctgaattatggttgaaaggattttatgagtcacttaagtgccatgacatatggaaagcatttccagtgcctggctatgggaggtactcaataatattagtttcattccctgcctcctcttacctcctcattcccatcccctgcaaggcatatcattaaagcctgccactgagttcccaggagattatgcaaaaagcaatttgttcatcaccaaatatttcttgagcacctcctacatgctaggcactgttctaggtggtaacaactcatagcttttgcattctaatataggaaaacagataaaaacaacacacacacacacacacacacacagagtttcaagtagaagaaggtataagtagagtaaagctctggaatattattcaaatagtgggctcagagaaaatttgcctgcaatttgagcagaaacctgcataaagtgagaagtcaagccatgggaaggtcagaggaccattgtttcaggaaaaagaaatggctaagagagaagtgagcccgatggggtccaggacctcatcaaaaggcatgaagtcaagaatgaacgaagtgaaggaagagttggaaagatacggagggagatgtaggcagtggccagaccatgaagaacttccaagccagggaatgaagtttggatttcatttgaaatatgatggaaatccactggagcttttgtagcaaataatgaaaatgattgaacattttgaggatcactctgatattgtgtggagagtaggctgtagggagtggggtagaggaagacagaacagtaagaaaacatcaccatcatctccacgagaagtaatgacagtggaaacagccatgagtagaggaacttaggatgtacattgaagagagagccagcaagcaacaaaacttgctgatggactaatctagagaagtgtgagggaaagagaccaatcacagctgtggtgtagggtctgagcaactatgtgagagtgctgctgtttggtgaaatggggcagactgaaggtaggtggatttgggagggagagccaagagttctgtttgacatgttcatgatggagcactagcaggtattcaggtggagatgtcaagtacacagtggagacttaggagaggccaagattggtgagaccaattagggtatctaaacctgagcctggaaaagtggagtcactgtggataggaagggaagagagtgcttcaactgttaggaagacaacccaacaaagaaggctgtgaaactgcagccagagagacaggaagaaaatcgggcaagtgaggtttccttgatgtcaagtgaactgttttaagagaaaggagaaagcagtaaggagtgatcaacatacaggtaagtaatatgaggggtaataattctctactgcatcagaaacgtagaggtcattggtgggagagatcaccacatgttagtatcttggtaagaatgatccagttgagagaggaaaatttgatgacacaggagagtgaagactactttgagtagaactggtatactcacaagtgggaattggtcttaactaggaacaggggcagttcacccttcctaactgtggagtgtgggggtgccaaagttggggtgcaaatccatgaagattgacgcaactggtggagggatggtgagaggggtctcttttgtttgttagtgaaagaagaatggaggttgtccaagtgtgaggagtggggaggtgatgctgaagtttggaagagacaggaaaatgtgtgaaagagtacttttggagagatagaaagggagtcaaattgggaaatacagagggatggcctggtaatgctgagggtgctgcttgcaatctgctgttgaacatttgggttggaacaagcgagcaaagatacgtggttttcttcagccaatcagctgctcagatgcagatgtgaggtaggcagaatgtacccaggaaaggggctctgccaggtgaatgagatgagggtagagaggagcaaatacatatgagttattgtaaaaatctctgaaagcagggctgccctgtggatagaaagtaacaccttcctatacaaaagagaacactgatgatagtctttgataaattactggagataaaaaacaggttatagggttacgtattttcttatattgttaccaaaaacatgaactacacttttactctagatttatcttctcttattcaagtgacacagctgtttctttcacatcctctcctaatcagctttatccttgttccttgtgtgtctgaatgtaataaattctttgaaccatacacttcaggtaacatgttcttatttaacgtactctcaataattcccaggatgtttcagaaaggttggcgaactatggttgggttgtcaactgtgacagatttcagcataatttatagcagtgaaaacacgcagttctttgcagttccatcccacagaatccattccagcacaataaaagtcccttgggcttttagaggagcaagtccatgcaattgcctgctggctaagaaatcatattcctcaccttgatcttcctcttcaaatcagatctctaaaacacacttgctgttgggccctgggtatttgatttgacctcgaatacttttccttcttatatctcccagccaatagttctctcagtcttataaatctttaagcaggactaggcttcgttatcacttctagaactcccttttaaagttcaagaaacttccagttttctaataaaaagtgactaatactgtcaaaaaccatgattatacatttcttgcttttctttcatatttccaactgaaaaataacaattgttctctgactgacagtttatttcatagtaggatcatgctctggccatgttatgaaatttccccagcagcaactgagaccatttactgagaatgatactctgtgctggaaaacctgttagaaggtaacaaaaatgccatactccagccacctatgccatgaggcaccttcttatttctcaggatgacctaatagaagaataagaaaggaaaataatctttgttgactatttatagaggaccatgcatttttcatgttatttcacttaattcttagttttaaggttatttattttcctcactagtgaagagattgatgctattgaggttaagtaaattgcccaaaaaggttaatgggactagtaagtgacagtgtcagaatccgaactcaggactgtcagattctatttatttgttttccattttaccacctttctttaccaagctctcagtagaaatatgattaaggaactgtcctcgaaaccttatgcttttgttgtgtttaactatgttaatgcagagttagaaatattaatcctttttttctttatagggaataaatggaaaagatggaataccaggtgctcaggtatgggaaatatgatttaaaataaaagttataatgcatactgcatccagaatacctaccaacatttacatcaatcagactgatgaaaaatcttggcaaggagtgattttcatgttgacatctgtttttcagggcatcatgggtaagcctggagacagaggccccaaaggagaacgtgtatgtatattactattgtgattgttattcaagtctgtctgttacaactgtcccatcatttgagttacacaattatgtgtgtagacccctgcaaatcaccaaatctataaaggctagggtgtaggcgatcaaagatctctaccagacattaaatatgacaacggactcagagcaagttatatggtacatctatgtagttggcctttgtacacagccaagtatactttgctatttaaatttgggaagcttttattatcctcctgtctcagacatatatctctactataaccatcacccatgttctttttatctagagtaaggtttctcaacctcagcactgtgattattcaggggcagataattgttgtggttggctgtttgggaattgtaaaatgcttagcagcatctctggccttcatccactagatgcagtagcgccaccatccctccaattgtgacaaccaaaagtgtctccagacatcaccaaatgtctcctgggaagcaaaatcactgcaattgagaactactgacatgcagaaaaactaagtagagtaaagaaggtggtgtgaggggttagagaaatggaaagtgtaactgaaagtatagtgaagttactagtaatgccaattatgttatatggttttgtgttgtttggagcgttaatgtcattattgcaatttctctttatttcctttaatgaacctcaacattttctagtagaattgatttctactagaattaacttctactagaattaatttccactagaattaatagaattaatttctagtagagtcatgccactgcaagaagttactcaaacattgttactcagtgtaattctattaagggttgctattgtatgtgagtgtgggcacatatgtttgtatactggtgtctagttcgctaacttttatttatcattatacaagtaatctataataactgaaggaaatgtgaaaatacagatgatgtaaatttaaaaggaaataaatctaccttaccccactacacagagataagcactgtgatatttgtacgtatttccatctctctcactctaatacataatatacacatatatttatatgtattaatataaacatatacttttccaaaaaggagcttatgctgtcttgtaagtgtcttttttcacctaacgatatatattgatcttttcttgtctgtaaatatagatctatatctaccttttaattgctatatgttattctactatttgaccataccttatttcacttacctagtccgctggacatttggattccttctagttgtcataataataaacatcactacaatgaacatctttgtacctaacttataaaataattttaatatgttaaagattgcatttatcttgcacatgatcagagtattaatcattgatcaaagtgtgctaatattttttcttgtcatctcagaaatttctccaaatgtgagctggagtgacagacctgtatgcagatatatttttataactaagacagtagcattgataccaggcctaagtgcttttatttctttctacatggcttatttccatatctgattctatgatcacacaaatctctgtaactgttcatttatttctgttaatttttaagtcaagagaaattgagtttgcccttctgcagagtagtcatagttaaaagaataatataatgagatacaggaccacttcaagcatcattccgtcatatttggtgtgaggatcacttcctggagttatgcaactgaatatttgaaaatttatgactgaagcaactgccatgatctctctctctctctctctctcattctctcttgcacaaacacatacagtagtagacacattccaggataaaaaacagcatcaagcaaacttcatatcacatttaggcacatctaatataatattttactaattaattatgacatcttattcaactgattcttgtttttttgttttgttttgttttgagacagagtttctctcttgttgcccaggctagagtgcaatggtgtgatctcaactcaccgcaacctccgcctcccgggttcaagcgattctcctgcctcagcctcctgagtagctgggattacaggcatgtgccaccacgcctggctaatttttttgtatttttagtagagacagggtttctccatgttggtcaggctggtctcgaactcctgacctcaggtgatctgcccacctcggcctcccaaagtgctgtgattacaggcgtgagccaccgcgcctggcccaactgattcttccatagttcatttatactattgagtaaatgatgtcagtgacatcctccccccagtcacctgctttgatcttttcaatggttctcccttctcaccatcccgtgggtatatatttagggcacagtgatcacactcaacgtgcacacacacatgcatacacgtgtaaagcacaaatacagaaaacaaacctgaagagtctaataaagcacaaacaaacaggggaaagccaggggtggggagagcacatgatttaggagagattttgaatgtcctaaagtttttttaagtgaaaagtctcagtaatgagatcctcttggcaatcttcctttatcattgcaaaggagacccagacctcaagtgacagctggtattgactcaaaactgccatcatcctagatgggcaaccaagcacacctaacattctctctatcttttatgtattaagtactgccaaggtgccaggcattgctctgagcactttacttgggttaattcatttagttctgaaaatcgccctatctaatggatactattaatatgcccactttgtaggagaggaggctaggacacagagagtttaagttatttatacaaggcccaacagctaataagtgccagtatgaatccagaacttttgctctcaactacagctgatgctagaagagattattctttgttattattttttccttaacagggtgatcaggggattccaggagacagaggctcacaaggtgaacggggaaaaccaggccttacaggcatgaagggggccatcggtcctatgggtccaccaggaaacaagggctccatgggatcccctggccaccaaggccctccaggctctccaggcatccctggcattccggtaagtagtgctaagacgctttagggctcctggcttgtaccgaccatgtatcccttttacaatgaaagcaatgatactgcctttcaaataaataaaacaaacctaaactggtccccgtgagggcaataatagctgtcatttaaagttatgtgccagatcctctactaagcacttactatacattacctcatttgatcttcacaatcattctggaaggattggtgtccttttcagcccagttttataaacgcataaaatgagcattaacttgcccaaggtcacagatttattaagtgggtcagacccaggtctggatggcttcaaacccacgcttttaacatacaggtactgtctctaatgtctccttacactacacagaaaccacatatgcctgtttcatattgctatgaaacatgtccatttcatactctattttgttgaatatcagaacaacaaatctgccatgagtagtgccttgaagtagaaaccacttaggccaagagtgtttagtaaaggaagcccatatctttattaatcctcaagaggagtggtgagtggctattctgcagagaaatttaatctgaaaatatccatgttaggaagaaaggagggtcttgaagtgaagtagggcagttaaagacacattctcctcagataatcaaccaataccagatataaagcaaaactgagcattcatgcaattttcatacttctatatttctgcccactgtcctgaaactctacttgaataaagcctgtgtaacttcactcttggggttgtgtcagtaattggtattagttgcattaattaaagttcattaatgaaatagagcattcttggaattattctgtcctaccggaatcatcactttataagcccatcatattggattttttttatttttattttttgtcattctaagtcagtttgttgttacaaatgaactagcaccattatgttaggaaaccccacaacaatactattatcacatatctacacacagacaggatagaggaattttcagtgaagagcgatgaggaacctacccaagaatgtttataataaattaaggctcactatctaagtaggctctgcttcattcttaaattcacattgcatggtgattttccgtagagcttccaactctctcatctgaccatcttctgttatggtctttgttcatgtttatatctcagagtggggcttattgcctttgtcacaaccgccaatcttcatcatattgtctttaatgccacacatatacccctggataataatcaccaactataaagagtaataaaatactttgaaattctaaccatcaagaaaaaaataatagctcctttaaaaatatcaaggcactataataaaacattactgttataaatgttaaattctttgtcaaatgcatgtggatttacttgtcaacaggtggaaaattcagctgacattatttgcctgcttccttttaccagatcccaattaagaaaagaaaattacttaatacctatatacttgcaatgtgtaaattacagaataaactttatgatgaaatgggtaaaacttgcttttatcccatgaatacaacattttttaaaataatccagcatacttggagttctgttccaggttgtcttcctttgaaaatacattatatcaattagatattgactttgccatccagggattggttaaaagttaaattgtgattaggctactaacatcatgtttatactttttagattatttaaccttataaaatgaagtcataggaatgtcttccctaactgtataaagccatgtgtctccatttaatgggaaacctgttgataccactggttatgatcccagcccatagcttttaaagcaattacacacttcaacttcttcccagaatttggtcaaagcaacagatatttattgcccaatataatcaattgccaaaagcatttttcttgataaatgcatccctacagaagtttcaaataggcaagccaacccaatatttctattctttattcatttgtgctatgctctattttaacaacctttttttttccttcttcaggctgatgcagtttcatttgaagaaataaagaagtatattaatcaagaggtcctaaggatttttgaaggttagattttcttaataacattttcgaatttttcactgattcccacctcccacctactatggggaatccctccagcaacattctcgaaagatggccatgccacaaaaaccttaaggggcagcccattttatgatgggacagctctttgatgaaaattcttctttatacaaagttaacttttgcctccctggaacttcctttcattatacctggtctgtaaaacaacacaggtaaagtacctgcttgtactcacatgacagccctttgagtatttttcaatatccctcatactcctccttagttttctcttttatggagtaaatgtgtctagctcctccactattatcacccctgggaaatgtttaatttataaatgactctcatttaccaaggaatattttgaccaatgcagagtagtgtctttttatttagaccaaagtcagcaaactgtaccccctagccaaagctattgccacctgctttgtacagcctacaaactgagaatggtttttgctttttggtagggagcagtgggagcgagttatatttttaaacggtttttaaaaatcaaaagatatttcatgatatgtgaaaattatctgaaatttgaatttgtttccataaataaagtatgcacattccttcgcctcttttctctggctgttatcccactacagcaacaggactgagcaattgtgacaatatggtacataaaggcttaaatattttctatctggcccttgcagagaaagttctgacccctgctctagatacttcaataattcatcctaagatgtattgctttttggaaaaaagcatccatattattctgttgattcattacgagttttcagttaactaacagccctggatcttccttataaaaatatttttaaatgaggtgtttctcattatggactgtgtgtttattttttgaatctaagtgtgtgatcttatgtttcctcttattaatttcaaatcatttgtgttcatatcttgttccaacctgaagatgtcttttgaaatgttgtctcttgaagagcaggttggctgaccctataactttgtgtcatgctaaatttcataagcatgtcatcattctagctgttgatagaaatgttgactaaaaaagccaagagtcaaggattaggtctttccaaatgccatgggattctttctgtccacttgtaaatcatcttctaatctattgtttagtgagctctgaatccatttcattgtcctaaaactcaccctacatttctttgtctatttgcaaggaattgacagtatcacatgattttgacaaatggtttgctaaaatcaagattactcttctgaactgtaagatttaacaaatgaatccatgttggttctcatggttcctacttcctttgcttagcatccataagccaaaaatagattgttgaatttttttaaggaataagattataagatgccccaagtcgatcttgactccattgcttcaaacacggactcaggtcttctccaaggagtcttgattattttaaataataattagcagtagagactgaaatcttggtgcttggatgcacattatcttactttatatgagaactagaaatacagtagagtaacactgggacttgtagctactttaatgacaaaacagaaaaaaatggggttttttgttgttgttgtttggttggttggttggtttctgaggagtctcatctgtcacccaggctggagtgcaatgacgcgatctcagcccacagcaacctctgcctcctgggttcaagcgattctcctgcctcagcctccagagtagctgggattacaggcacccaccaccaaacccagctaatttttgtatttttagtagagacggggtttcaccatgttggcaaaaaatgtttttttaaaggtcgtgaatttatgctgttgattttaatttaccttgatcttcactaagtatctttatcttgctctgatatgacagtttactaatacatttgtccactcttttgttgagctaccagtaattttaatgttgcccttaaattttgaggtcttttctttcattctctttcattctttcttcttctttctttctttatttctctctctctctttctttctttgttttttttgacccttgaatcaaacattgtggactagactctaaactttgctttccaaacactcatttccccgtcaggaagtttgaaaaaaaggcaactgtttgaaaaaagacatctcaagctcttcaggggaatactgaagaatatacccatggctacataatttgcggtgttcagtgcacagtgaaaatgctggcacacttgttaaaaaatgattaagaattttaagacagcaatagtaaagccgtaaactaaacatggggccctatgtgactgcataggtagcccggacatgctagtcctggggacaggacatctagaatctcagatagtatccatgcatttagttgacctcaaccatgaaaagagaaatgccagcgtatgtgtatttttgaattgcaatctaaagttttcctttaactcttaatccctatgggctgtagtgtctttatttatcttttatctaagagagctttaatactgaacttcagtctcttaagaggctttagataaaatcatatatttaatagtcagtaattaacccatctttttggaagctgattaagaatgtcagaaaatataaccaagcattttcagaaaaaaaaaaaagtgacatgttgagatatagaaggtgttcgttttacaagtccatcagacactggatgaaggtgtggcccctggcagcctgccctgtgcattcagcaaaagagacacttctactccctcctggggaaggctccgtcctgcccactcccaggccattctgtggctactctcatgaagggctatcagtcttcagaggaggcaggtcaggggagttgggccactctccatctgtgttggggcaggctcaccagacttctgctttctgagaagctcctcctctgggtctggatccttcctctctgagttcctgcccctccttcctctgtcacagcccacctgcctggaagctgacaggtgcagagtcctccccaggtctctggcttcacacccatctctcttactgcgtctctgtctcttccagcctggccaggtccaggtgagtggctggacccccaccagagccagtactccctcagaaaccacaggtgtcttagccttaagacaatattttaaagcgacccataaggaaactattttctgagacttctaaactctaagactccatgtgtgatagccctttccttttgtctctcttgacactagtccagcaaaactgtcttctcccaaacaaaactgtgcctgaaacccagaatttagttatttagcatttaagttaatttgtcccaagatcatttcaattcactccatttaattttccacttagaaatcactttttccatggcttctgaacaccatttacaaaaaagaaaaaagaaaactccattttcacaaatcataaagctccaaggtcacaattaccattttcggaaagttttttctctaaaagcaaagattaattttcacatgttaaaacagttacagttaagtagtacagacagctaactgctacagttaagtagcacccgtctccttctctttttcttagtggtttcacaagagacagtgtcaataacagctaatgctatctctgctgcacgcatccctgcacatctgcagcctcgagagccattgtctccgagcggcaagtcgcagactgtcagcagggactcgaaggagtccttggaagatcctgctctccaactttatcatcccaagtgtccagattacaccctctagtgaaaccctagaccaggatgacccaaactttgggctctcctcttgtggctttttaacccctttggggcttcccaggtgacccacctggtgatacaataccctacaaatctcaaaccttgatctattttccaggccacctaacctcccttcaacatcctggtgccccttcccaaacctaactgtggtggaaagaggtgtcttttcaccaatcccaagtctaggttccagattgatcactatgcacaaatatatatcctctctgaagttcaattaaattcccaatttgattgtccaacaagtcaagtccttttgctagtaaagtgaccacacaggacaaggacagatgccatccatgtgtctcagcttagcatttggctttagaagggcttcccagctgccagtgatgctgcccacgcaaatgaggctcttgccagatctgagaagtttaattcttgctattacactgtcctattatgcttgggaatttacatcaacatgcaggaagaatttaccaacctttgcagaaatgtgtactaacatctggctctctaagttcttgagtcaaacatgggaccaataagcccacacctccagctgtgggagaaaagaaagatttgggctaagtattcccgaacaatgtttctgcctccagatttccagtgttcagaaaatccccttacctatgttttctcgatatgcatttcatacatatatttcatatatatatatgcatatatatatgaatgtgtgtaaatatgtatgatcctattttcttatcccaaagttgtaacatcttttcttacctctctacaactaagatattaatttttatgtatgtatatatgtacttgttatatacacttcatctgataaatatacatcattgatgatatatatatatatatatatatatataaagagttaaaaaatatattttccaccacatagtctctgtttcttccaatttgcttctttctgtttttttggttgcaactctgttgttcagtttgtaggatttcctcagtgtccagtaatccttggctgtctgcatacataagagcagggttttaaaaaccgattgaaagttgtgagcgaacagtggggcttgccaacctcgagtttcacttagggtagtccagatgggctttttaagtgagggacccttaatttcagtgtctttaagtctttactctcagtctggtcagattctccagtggagacattccatttcctgcctggctgtgagcttagctacttcagattttcagtttggaagcctgagtctcaatggagtctgggctcctccatgcagaggcagactacttacccttttaagataataataaaccctcagtcttttgctagggatggggagaggcacctgcctagctgtatagagaaaggaatttcaacaactactaaaacaggctttcaatcagtgctccttattttagttcccctctttcacccccacttccagaggtaacttgtactgccaattctgagccttctgaggattttgtagtttaggtcaagttattcctctacttctagtctaagagtttagttttcttgcatttgttaagtaatgtatcactcaaccgtctggttcttaacttccaaaattgtgctgctattgtctcctttcatatgctcccccattcttgtctgtttaggcctttaggaggattgttttgctaggattcaggaggtagttaaagcagatccatgtgtttaatccgccatctttacccatgatagttcaaagcaacatactcattaaggtggcaaatgattgagacagagacaagtgaagtagtaaccacctttgggtcataatgaaccacaaaataaatatgaatccaccaaatgatgctgttgaattaacagtgaaaaatgaaactagaatataattattaaaatatcacaggaaattactcttctgatatttttgccctttaggagagaactatatttaattttggtttccacatttaggagacatttatggaaaagccctgaaataatggaaccaaaaggagatttacaaaatagattgtgaagcctatgagtaaaagttatttaacctgaatgctaatatgtaacaatatgactgatttcccaagggaaatactcattaactgctctctgtttccataatggggtagcaaaataaaataaattgaagttataccaagaaaatggataattagacatttccatgggcattaggaggagaagaatttctgtctttgaaatatttacaaattttgtctgtgaaatagaagatagacatgggccagatgacatgtgtgtgttccttccttctctaaaatacgtagtttatcatcatattaatattaatgtctgtattatattaaggagcccattctccaaggaagccaagccttggtctcatttgttagagtgactgctgtggctttgccttggcagatggaaaatgtgtgtttggtttatgcatgcttatatcggaactcttcaattcctgcctcattagaaagcatagccaaaaacattttaattgactgaagatccctgaaaacagaggaaaagcaattaagaataaaggcctttacaattcatctggatgctctgaaacatattattgtaaattatagagcattagggtagggttcagaagaggtaattacccttatgctaaatgactgtttctgagtgtatttcaaagccagataatttacagctagaagtagtgaaaataattttctgttttgctaaaaatattaaaaaccaccaaagtacttctaaactcaattcatatattaaagaggaaaaattagtactgtgaatatttgtgtttcgacattgaaggtatttaaacagacatgtttcaaattaagaaaaattgtgaccggtctcagtggctcacgcctgtaatcccagcactttgagaggctgaggtgggtggatcacgaggtcaggagatcgagaccattctggctgacacggtgaaaccctgtctctactaaagatacaaaaaaaaattagccgggcatggtggtgggcgcctgtagtcccagctactcgggaggctgaggcaggagaatggcgtgaacccgggagacggaggttgcagtgagctgagatcacgccactgcactccagcctgggtgacagagtgagactctatctcaaaaaagaaaaaagaaagaaaaattgtactgaaacacatctcttctttgaggtgcagaacagcaaatattcaaactgtgattattgaatttcatatttattgtaatgccccaagttcataatttgatgtaataaagatattatatgtacattcagtatgatgatttgtaaaactaaaactatatattaattacctatttgttttatctattagttactagaataagatatagtaatatcaaccacacatcccaggtagatagtgaggtagtgatactcgagggcaggtgatttcatatcactccttgggaccagcatccattagatccctgttggcctcccattcatccttcagtctgcagccagagattctagtcctgtgcgggttgtggtatatttccattctgcatgctttgtgacatgagaatgtgaatgtaggtgattacttttcggataatgtcagctaatgctctatagctattggggcttttctcttaataattctatatgaaaaaacaattgtttttctttcttaaccagtatgggcctacattgtttttaaatgattgttttaattgaaaactcatgggaaaacagattttcctcagaagtaatttactctttatttaaaaatttacataaaataaaagatacatatctgtttaagtatgcctttgcaattcaactaaatcaactaaactgaatgaaaagactggagaacatggaagtaactctttacaagacctatatcatttgggctttgtgttttctaactgacggctatcgtttctactgcgttgttgtctgtcatttggtctttacttacaaaataaatactaatttcctcagtaaaaaaaacttttctggaagatttgtctgcaccaaacccagactaaagtttttaaattgaatatttatttcttactacacaaaagtgtctttgaaaaattgtgtgtaaattattttaaaataaaaccatttaaattactaagagatttttgaagaagttatgcaaaaagaaaaagaaaaaacaatgcgattaacttcttgtcatggcaaggatagagcctcctcaggttttctgtttgaaatctagttgttcatatattagattttttaaatgtgaggtatactaaatataaacaaaccaagcaattttaagaaagactccagtgatagattgtatttataatggccttggaatgagttaatgattttaccaaaattaatttcatatagtagtaaaatattcgatatgctttttttagttatctgttgctgcataagaaaatacctccaaactttagtggcttaaaacatttatcttacatttcacattataaatgtttattatctcacattttttatgggtcagggacttgaagtgttgcttaattgtatggatctggctcaggatctctaatgaagttgcagtcaggatgtcattcagagctgcagtcatttgaaggcttgactagggctggatgatctgcttccaagttcatgtgcgtggccactggcaggtagcatcagttcttccccacatgggcctctccacaggacttcttgggtgacctcactccatgtcaactgccttcctccaatgagtgatctaagagagaaagcaactaggaagccacgatgtcttttatgacctcatctctctagttgcccactgttaattcagcctttttcttttcactagaaatgaaaagtctagcccccattcaaaactaggagaattaaactccaactttggaagacagtgtcaaagaattcatgaatatattttaaatcaccacacatacgttcacaacattcctggaaagtgccttaaagttattatgaaatcattttttaatgtgaacctaaactctctccacatgccattaccagaggttagattccatgctagtgttctgtccactagattgttacatctcagaagcactgaaaattctcagactttctgagtgacacagctggtctgcatctatacacaaacaactttgcaatcgatattatttgtctaatcaaaaaactcagcagtcagaccagttggtaaattagatgtgcttaaattaaaaactaaatctttttgtttgtttgatttcatgtattttgaaatttttgacataaaatatttctgttctatgatatattattttttcttctatacatgaagagaggatggctgtattcctatcccagctcaagctgccagcagcaatgttggctgcccaagcttatgggagacctgggccaccagggaaggatgggttgcctgggccaccaggagaccctggaccccaaggtaagtcttcaagtgtaatattggcttattgatttttaactctctgtatttataacatgttagtcacagttaaggaaaaaagtatgtatgtatgtcctttatttatacattacatatataaatatatgcaatatataaaatggtttcatatgtaatctctttataatatttgacattctagaagtagatgtttaactattactacttcaaatttaaaaccaaatgagagttacctggtattctaaatgtattgtaaaaataatatttattataacaataacagcaataatgtgtgcttatatatcattattatctaggaatcttagaattttttaggcttccccttttggtgtaagttaagcaagtctccatcatctgagtgtcttaaataaactggagaaagagttttaggtgactcaacgacaaatagttatttggttctaaaatatatttttaagaaattttagaatctttctgctttgaatacagcttgtggatggtaacttgaatgttaaagaatttttcacatgatttctaaagttcttaaaacccaacttatattggcaaagaattttgttccacttatgacaacttgacgagagacataatcttaagtatagcttaactaaattaatctgacaaggccatttgctagaaatatgattagcaatccagcaaagtggccaaataggcccaggcttagaagagtcaacaactctgaaagggaaatattaaattcagtgaatatatatcatgaaagataagaccaggaaaactgcttcttattgttaaccatggaggatctcaggttccttccttgaaataatcaaaagcaacttgtataaagaaagaaaagtggaaattaacactaaaattaaataagaatgcagtccaaaataatatatatgcaaagaagtgtttttctgtcaccagtttccttcctactgctattctgtaatattgagcctcattttctgaagtgtcccaaggtgactgatgtgcccttcctcttctgaaagagcaacatctgttcagttcccaatagcagtgcctgttagtatatatatcttaatataaccttataacctatgaccatgattgccaagtctttgcgtttaattagcacaatataaaacaggaacagttaaaatctctctagttttttttaaacgatacatatattccaccattatctttagattatagtgaagtttggcagattgatgaaggaaagagaaaagtataggatgagaagtagccctctatgtatacactattgtgtagagggggctaattattatctttcgctggttgggtctattctgaagtcagagtatatgagactggcatgcagatctcaaaagcttatctgaaaatgtgtaatgcctcaagccacgtgaagaataagcagcgttaacaccaataggaagaaaactttggatagatccttcaaacagtggtggtttgagaagacaagaacaatggaaaattgagatgatcaaggaaaacagctctggaactggggtctcctgttccactcaaacacctggcttcagacacctcacaggtgctgcgaaggcccatttggaaggctgtcagtcagaggcaattctaaacccacagtgtcagtgaagcttttggaaacaagccttctgttcaccactccacttgcccttccttttgcaaaggatttctatggatttcatctgctcttgtgcctcaaagatattatagactacttctactcctgatagggcttctggatgcaattcttaaacttggaagatatccccacatgatttccagtttttttgtgaaccaaggtttactaaaattgtcaaaacttttgtctccccattgggtttctgacaacagacatatcttgactacaacttagtatatgtctccttaacctttacataatactttcttttcagtatttgttaaatttgcctaaaatttagcaaaaaataaataaaaattgcaaaacatagaattcatttttaaggaatatgtgtttcttaaaaatatttgtttttaaggaatatcagtacagtaggcatgctgtactgataatcctgcctaaaggcacagagaaatctcactgaaaagaaagaaaatgagaggctgctgtttaatttttggtgcctctagagaagtgcacaggaaattgaagtgtttttctctagtacataaataggtgtgacatgctcagaagatgaagttatacatgtaacttataagctttgctctgctcaatttaagtgtttttttccaaaaaggaaagaaaaaaatgcatttaaaatcaccagtgaccacgcaaacctcggatgctgttgtctgaattagtcctcttaatgacacagcatgactgagtttaagaaagggttgaagtcagaaatgcaacataggttgggaagaaaagatggcttctgaatgtgacacagtgtgttctgccactcattcatcctgtctgatggtggctcctctgaaatttctagatgagacattttgttttgttttgttttgttttcagtgtttgtcaggaaagaaatccatttggttctgaaatacatttttaagaaattttagaacctttctgctaatagagcttgtggatggtaacttttgaactttaaataatttttcttatgttttctaaagtttttaaaaccaaaagttgcttatattggcaaaaaactttgttccacttaggacaatttgacgatatatatcatcttaaatattgcttaactaaattaatctgaaatgtaaaattaaaattaaatggttggtttgaaatgtgcactatggaatgagtcctttattatctttaggaaaggacaaaagtataaaggggtttcataaggtttcctgtgcttattctgagaagccggagacgtatagaaagcagtgagaaaatcgacgtcagactgtgagaggtacacaattcatattgaaaaaaggaagagccgctcctaccaagattctgatcatgaaagcttgaggatccgccttcagcaccctgaccttcttaaagtgaaaagaaagaccttttggattctgagttgcatcacttcatttgcagtttttctaatgtttccaaaggggtgattgtcgatgtcttttttaaattgaaaacatttccagacagcttttagattttagccgtcccatggggttctgagtattggcttcctgctgtgccttgagagaactttccttggtgtccattcccacctggggcttgcagcacagggcctcatggctggttctcccgggtatgagctaaaatgtgccacatcagaataaaagaaaccccaagaagcatgattcagctgagttcccctatataaacaggagaggcaaattttcctaacagacgttattctttcgagtgagttttatgagaaaacacttcatttaaacttcttctcaaacacagctgattctccatcacctattccacccgaggaatagataccacacctaaagccctactcatttcagaaggaaactcacatgtggggtcagtaggaaaaaacagctacatccatcgcatgcaccctgcatcagttccaaaaggacagtagtgggaatagttgttcttacttgtgcacttttaaagtaattgatcatacatactgtttgtaggaagcacttgtgatgtatagatttgacctttcaaatttagtagcattaggggcatttggatatgggaggacatgtgtgtgtgtgtcaaaatgactgaagggcactgctatcaattggtggagtagaaccagggaggctaaacaacttgtaaggcacgaggcaacccctaaccccacccccaccatgcccaccgtaaacaactatccctcctaaaatgccaatagcatccatttactggcctttttccggtatgtatacaggcgcacagatttacaactttagaagtaaatctctggagtcaaaactgaaatcttcctactggaaataaacacagtctaccacctgaaaaactacaccaagcaccaggtttcatcaatgactagtacctctagatgctttcaattaggacactgctggtgttttatttgttttcctacatgagctgcagttttatcaagctgtcatcctgtagaattttttttttttgagccggattttcactcttgttgcctaggctggagtgcaatggccataatcttggctcactgcaacctccgcctcctgggttcaagcaattctcctgcctcagcctcccaagtagctgggattacaggtgcccaccaccatgcccagctaatttttgtatttttagtagagatagggtttcaccatgttggccaggctggtcttgaactcctgacctcaggtgatccacccatcttggcctcccaaagtcctgggattgcaggtgtgagccactgtgccttgcccatcctgtagacttatcgtatatggaaatacatgtctctttgcagatagaccagcctcttccaaatttaaagacaggtccacgctgaagaggtgaaaagcttaattctataaatggggaaagctgttattgaccttgttagcattcctacaaggagttttgttatgaagtaatgataaaaaagaaaaaaaaccctacggctttagggcagccttcataatgaatgagcttgggaccttaataggaaattcaagagtagaaagtacttgtgcaattcagtcgctttatctattaataacaggtaattattaacctaatgaactgagaaatttgtacatggaaattgttacatttgacaggagaagggtaaatgttaccttatgcaaatacacgaatcacagtttcttaatttgtaataccacatgaaccgaaatgcatgcagaataatatatttctgcattatattgcaaatctgagagctgaacttaaatgaaatcgctaagttttagccaatatattcttcatttggaattgcgttacactcttgttaatcctcttattaatcaaaagttcatgtatcttcagttattattcttcctcatatttttagcctgtaatcttaagtacttactgagatagctgaggatcaactttataacttttctgtaatagtgggacctgagttaaactatcaaatatacctcaggaaataaatattattttactccagaaatgtttaagtaatggatttgggagggtggtttcaaatgaccctaagtatatacatttttttcctgctgttcacatacgttaaatgaaagtcacctatatcaaagaaatcctggaaacattttaaatttcaatatagatcaactatggttattatgtcacatgtcaaagccactgttctctctagggtctaggattgtactgaatatctttaacacaattttcaaatataaatatgtgaaggtttcctgctggtgggtgtatttctactatatacttcaaaatatttttaacatatattcttttttccactagtttcacatttatgatcaggtcttacataaaaagcaaataaatacctgtgtggtgattacattgccaatgttgttcagataataatgtgtacattgtatgacctagtcaaagtgaaaatgataacccctgctatctaaaaactgctatctaattctcaacaataatgggaaataattgatcatacatactgttcatagggagcattacattttctcctcctgccatgttctactgtaacagcacacctttatgaaaaggcacaactaaatcacagcctactgtttcctactgagatgctctcctactgatatctttgctgtgtgtccacatgagtctgcatggctgctctgtccatttaggacaaggagtgatctttaaggggctgtttaagtatgaaaaagttggaaataaaaactctatttgccatcactgtgaaactcttacagcatggaaccttttattcaaacaaagtattacatgggtgccaatatataaaatgcagataaaaatgctttatgctttttataagcagggataatgacttccagagacacaaatttctctgtactcttgtagctcagccaatagcaagcatattagatagtaagaataattttgttttaaaatatagacagatcttagacctaattcattttggttaaaatatcttaagttgatgaagtacatttgggagactgtcagtctcctctcttgtttcctagctttgctgaagctcctttggagttatacactgccatgttcaaacatggggtggatgtttaaacgttacttagagaagatataatgtttatagttgatcatttgaacacagacctgactttttagatgagttaacccacatatactcatgctcttgctatcatctattagaatcttgaattatttgttcctttcatttcctttaattcttggaataagatccgtattcctattatattatcttgttctcattttaagcaagactctttccatatacttctttcatttagcctataccttgccttcaatcagaattcctactgaagagggctcacacagcttgtcatagctatttgcaagattgatttatttaggtgtcattttcagagccaaaatctcgctatcaagagtataactagttggggctgggcatggtggctcatgcctgtaatcccagcattttgggatgccaaggcgggcagatcacctgaggtcaggagttcgagactagcctggccaacatggcaaaaccctgcctccactaaaaatacaaaaaaaatagccaggagtggtggttgagtgcttgtaattccagctactcaggaggctgaggcaggaggatcacttgaacacaggaggtggaggttgcagtgagccaagataatagtgccactgcactccagcctgagtgacagagcaggactctgtctcaaaaaaaaaaaaaaaaaaaaagtttgactagttggaactttttatagtaattgcatgttttttaagatcctcattgccctattatacccaatctgtttgatatgtaagtttaatatgtggttaatgcaaaacagttagctaatatactatttattttaagcaaatgtatcacataattatcacagactcagaaaatggttcttctctgtgctgtgttgccatagaaccctttttgtgtgtctcttttttatatatttctcacttaggctacagaggacagaagggagaaagaggtgaacctggaattgggctgccagggagtccaggtcttcctgggacttcaggtaagtgggatattgtcttcacaacacaagcaagcctttacaaattagaaccatgcttctcccctagggtccttatatgtcaagtcgagtgatccatgttggctagagggtgggagagaggaagggccatatgtgatctgcattgtaattttttttttatgtcgttagctctgggtttgccaggctcaccaggtgccccaggcccccagggccccccaggacccagtggaagatgtaacccagaagattgcctctatcctgtgtctcatgcccatcagcgcacaggtgggaattgaacacacctgaagaagacttggttcctggtaacatttccttgccactggagctctcttaataccgtcaaaccctcatcatctgtgggttgctttttttttttttttttttttttgggagtaagccaggcattaaaagcaaccgtttgaatcctattcctatagcaattgcaaatcagcattttttgatttttcccaaattcattccatatgttttgctttacaattgctatgatttttactcagagttttatatgaaatatgcaagtaaatcttatcgttagttcttcttcaaaaggaaattgcatcttgtgacttagtagactgatgatgatatccattttgtagactcatcaacatgtggttggcctttgatttctgaattttaaagtttcagacttatcttttccttggtgtttaaatttactatcattgctaaacatctcgtcaacttttttgatatagtgcattgctcctgttgaatgttttttgactactttttataacttaagaatttttataccatctacatctatcctacttatgcagaaaaataggcaataagaacttcattttacaatttatgttttcaaaaaaaaaatgcaggaaactgttttatcagggagcccaaacacccagcatagccaactactgaaatgattttgttaattctgtataatgagctcaattcaaagcaatcaccactggcatgaataagtactgcatgaaaagggagtatcaaattccagttttgtatgagttctgcaaaaaaagcctaatattctgtggtcccctcactcagtctctcatttggtaaacagaaagctgttttccctacaaggtgcttggtggtgaagccaccaagctgtctttggtactcttaaagcttcagtggcctagcaagatctttgggcccttgtatccattatccttatgacctcatcaccctcagactttaagacaagaagccaccatcaaaacaaaggatgggatacgtaaagaatggactcacttgtcctagaagatgaatgtgtagtgtcagcaaatgcatgttaagaaggtgaagcccaaaagctcttaaggagaattgtatttctccagaagctgcagcaagaggtacagctcaacaaaggaaaaccacaggactggatatgcaactagtgctcagaccaaagagttcacacccactctaaaaccatgtcctctgaaaagaaacaaaaatacagtgatcatcaaatgcctaaacagtctttctgttggttagctgtacattcattgaggaactgttgattggcaggcactgattctctagaacactgggcatgaggatgttgcagaaatctagatggtgggtcccacagatgtgagaacatgctgcaagagcctgccagccacagcaatcaggactcacagctcttcaaggagcagtgcagatttcaatttggctaaaacaggatgattgcttttgtctgtttactgaaaaatgagtttagaaaggctagcccactgacattggaaaaagctgtgaacagagttgtgtctgaggaatgtgcctaatttaaggcagggtttgttccaatgcatccgtgatttgaaccggttttcattatagattaatgaactgctggtcaggtactgtctacaatggctgtgcatacctataacattttaggtatttcatattgaattatgctgtatatttcaattccaagtttatttattttccaaggttattttatttattgtaagcattttgacattgattttttttttttcgttttctttcttgtgcaatacctacaatggtgctgtgttttaaacttacacaattgggacatacgtatgtgttttcttagtaaaatggtaatttatcccgaaaaagtgtacatagatctaaaatttggtgctatgtgtatatcttgagcttttaatttgttgaattttctaaacgcttacaacttatctgccactcatattaatttacttgaatttgtcataaagctaaatattttatatgttttcaaagattattttttcatattaataggttgtttatctttttgcctgtttgctaatttaaaaatatttattttatcattttaatgttttcatggacttttttgctgatggtaatcaactttttttgttttttggtttttgagttgttcttgtcatagacataaaaagacaattcattttcttgttttattaactctgttcatttttattctacaaaatatgtcatgcattctttcttatgaattgtatatttagaaatctttctaaataccattaaggcttgactggttaattcctatttcaaggatttggatttattcaggtaatttgatgggatggggaaatataatattgtgtgatgcatattacaaagtggacttgtcacaatgacacaaactcattttttgtaactgggaaatatgactaaatttgacgtaactagagaaacaaggctgtatccacatggtacaagcctttctcaccctactctattatttaccttcagatactttttcctgcctcagctctgtacacatgatatgcaacaaagggcagcaagaaatgctgggtccacctaatttaacacaaaatgaagttgagattcggcagttgcccaattcctttaataaaaagaaactaaataatttgggccccaaagtagggtgggaagttttcctctaaatgacttgatggttgccaaatcccttgcaccattttattccattccaaaacatgtgtttatttccacatagatgttaatgatgttcaaagcaggggagaagaattattcaatttcatgaataactcttgtttgcactccagaaaacaacatacatgtttaaatacaaaataattatgggccatgacgacgattaatattaaaactgtgatttccatatacaagtatgtttgagttccaatcttacattttataccaagttcaaaacactttcagatagaagtctttctatgcaaagattaaagtatgacttcaattcatatttatggcctttggaatccaaagaaaaacagaagaataattcatggatttgttcattgttctttccaactgaaggcagtaaccattacttctaaccgtaacacaaacacagcaagttttaaccttttaaacttttcactttgtgagcaaagtaaccccataagtttatttccctatttcatggtattgtttaaactttaaaattttagtcacttaaagaacttaagcaattatattaaaatacgttgtctgtgaaaattatcatttgatatttggcttataaagtaatttttatgaatctgttttatgagttaggtaagatttagcctttctgcagtctgtctcatctgttgggaacctgtgatatacctccatttgtccacaagatggtgtttaaaacaatttgttcagaagaactgagcaaactaacagaaatacaaggctacgaacagtttagtggacaactaaatcagactcttgcctttgcacttttttttaacttttgtagataatttttgttaatttgttttgttaatttatgtttttcctaattttaagcatctttatgaaacaggcacagtaccctttggtttgttgactgttttgattttatttcttcggtggatatatatgtacttatacacttagttaacatgcagattaactagtcataactgtttatacaccactctcatattttagtgatcaatatgaagacagctaaataattatcctactttttagacaggacagatactctctttcaacagacaagaaaaaagatttagcttatcacaagaagcagacaatttataaaactacacaatgtctaaactctatgttgctcagtgtacttaaaattttacagttatatttgtataacgtttatatttttctagaatacatcactatttacaaaagtacgattagaaacactgttttttttaagtaccgtttttattttcgtaacactaataatacactgggattgagaatttctgttaagtgttttgctgacgttgttttaatgaatactcaaaaaagctttgcagatttgtccattgctcttgttcttaaattatttttcatacttgtctgtatccaccttctgaagacacacaagtgtttactgtcgcagtttcccagcgttatttcttaatacttgagtgttgacacatttttgtaccatcccccttttgtaccatctctgctcacaaagattatatgcaggctttgaagaggaggagatgcagaagataattgaatttgtatcttgtatgcctatgtaattcaaagtgacttagtccattgaattgtgttcatttattagttggctggttaagatagcattaattatcttaaatttattcaactactaaaagtctcaggcaataggacaaatgagtgtcatcatttttattgtgtggcatacttggagctataatccaaacgttttactcaacaaaataatgctagagtaactgatcaatttggttaaattgaatgaagaaccaagtgaacacagagaaaacttattcggacaagtagacccagcacagcaaaaatttgtctgaaagataagacaagcttataagaccaaagctaagtctaagaaaatctaaatggaaaaaaaattgcgtgttcagatccaatagtgagtgatgtggtacaactggaggagttagctacttgcttcatgaatttgtcaaaagtgaatactaataaagtgggaggcttcactaaatgagggggtaaataagatttaagtttatcagaagtgtgtgtattgtgtgaccatactaagcttctgggtgtaagtaaagatgctggctattttacaactttttattgtattgtgttatgcaaagtacattttggagataaatgtttttcagcacattaatgtctttaaattcaggttgtattgggtgtattttacaactatttatttttaaataacatttagggtgtgttttcccccattttgtttgttctctatcttacctcatcaaactctttacgatttaattgaatatactcatgttaagtgcaatggcattagttttattcaaaatcccacatgggcataatgctttgaggccttgattcctacatgttcattatgcataatgagcttgtcacctatctcagcaataaaggttctgaccctatgtcagggaaatctaaggtgcaattattaaggccatatctactcttcatcacttgccatggctgaagctccacacttcagtccattttgtttggtgtcaaccatggggatgctccagaagcactcttggctaaccatgagccccacaggtgtccaaggaacgttaattggtctattgcagggttcatgtttgtaccatcattatagttttctttgtcacatgaatcattgctcagcttgaaataatcaagtttgtcacccatctccctggcagttcataaaaagcctagtctaattatttcagatgagaattataagcagaatcaaaagcccaaaagcaggcagtcctttgggacttttgtcccccagagtgatcatctcactaaaatcatttgagactttttgctatagaggtccctgagggagataagaaataacacaattaacttttctcatccatagaagcttttacaccatgagtgataaggtaataggcaataagtagttaaatacatagcaggttttcttaacagaaattaattgcatcaaaacgtgccagaggatttatatgtttacctataccgggtaataacttacatagttcttaactattcctatcttcaggccccctttggataaattaactaggtgctctctaaagaatgttgttgtcttttcacacacatattttcaacttaagagacaaaatggaatttcaaatatatctcagaaagagaggtaatttgtttgagacagtttccctcccttgttctctctccagctatgttttgataacttggagtcaaaagtaatttgtgaaggcatgttaagcagagagttagcatgaattgccatttattaagactaaaagtaattttcagttagcagcatcctcttcctgatagccagatcaatcaaatatgttacacttcctctcgttgatcatttaaagagcacttaagcgtgtgtatttacagacaggcattactacagtcagcccattttgatttaatagttcttgagccataggtactttatactgccatgtcctggatcacaactcactaaagaaggctacacaattgaaaagtatttattttactttgcacaaaagggcttgacctatgtttattgaacacaagtattatttttaaaaagatatttaaaatcatttatgtttgtcacccctctataaacagcaagattgctagtttgctagtattttttccttaatactgagttttcactccttttgccaggttaccagcaaatatttttaagtaattttcttgatatttggaaatcagaatttctattggttttccacctatgttggtttacttagtttattttagagacagggtcttgttctgtcgcccaggctagagtgcagtggtgtgatcatagctcaccatggcttcaaactcctggtctcaagcaatcctccaacctcagcttcccgagtagctgggactacaggtgctcactaccatgcctggctaatttttaaatttgtttttatttttacagagacaggagactcaccgtcttgcccaggctggtctcgaactcctgggctcaagctatcctcccaccttggcctttcaaagtgttgggattacaggcgtgagccaccatgcccagccttggtttacttttaaactcagagactgtatctcagaaacactataatcaccaaaaaattttaaaaacacaatagaggtgatcttctacagcaggaatttatattaagcttatttcagttggcaaataaatcagattttactaatgatgtttaagaatagcgatattggttcagtcagcttgaaatgtaaagtatccaaataatcaaatcgatcacctatcctgatatgactactcattcatattcttctgctgtgcagaagccaattacccaaaaccatgccagggaatttatgtgctcagtcagtctcggaagtgatttccacagttcttaaccaacctgtcagctattagggttgaaaatcatatcatactgccatagaagcaccggctagaaataaatcaggaatcatttgcccttaattaacatgccaggttcaaaccaactttatttatttacactctcctctcccagtgagtgctctagttgccactttatccaactttcaaaaatatctcagagaggatttgagatttctattttgctagagagacatgcttggtcagattcaacatttaccaactctctttcatggagggaatttgctgggctcttttccttgcaatttctaagccaagtgtcttctgcttctgtaaactacttcacttaactgaaatttataacgaattcttcctgccatttggaatgtggtagttttgcataatctatttgtaagtgcttgtttccaatgttgctgactgtatctgtggagcttgttgtacaacctttacataaccaggtttgtaaaacagttgagtgaactgttctttgaaattttattttttttaattttcttatgaatattataaaacttagaaacatgtttgattatctaatttttcttttattgtatttgattatgtcactctagttaaaataaaagcactttggtgaaaagataatttctatgcctttatttaattatgtgtcacagctcctgaaaaagtttgccatttttttaaggattgttttagggagctataacagagacctttattttcaaaagtcatatttgaaaaaagggaaagaacattctttcagtctatgtaaatagcactgatctatatggcaaagttggaatcttcttaagcaaaattcatgctagaagcataaaactagatgctgtaagcagttttaaagaaatccaaatacagattacataatgattgatttaaccaaacaactaggactagaatttaaaatgtataaaagtacacacgagaaaaatatatataaaaaattatattagggctcactctcctttgacttgacagaatttagttccataaactaactaaagatactatgttgagctattgttttatgccccagcacaggttactcacaggctctgtgatataaaatgaatatattaagtctgttggatagttaagtagatgttaatgaaacagcaagccaatatgattacacagataataataaagtgcttaagtggtcaggaaatacttgttaagaatacagtgctttagctgagctgcatttataaaatttacaagaaatggtgaaacataaatcatgtttacaataaagttctgagtaggagggagctaacaagccattggaatgaaggcagtggttcttaacctagaaataaagcaaggctagacttaaaaaagtccacgaaatctctgaaatactatacaaaaatatagatgcgcatgcagctgcacatctttctagggaattaacatttcgaaaaggtccatgaagctctctccatacacactaaaacacacacacacacacacacacacacacacacacacatacgcatctgtcacagggtaacaccctctgtggaacagctttttaaattactttatgtagaaaaaacactaatattataaacatacacctatagaaccagtagttaagtaatgtttaatgtatctaaataagctcagtaacttcttttcattgaacatgattatttataagaaaacatgcaagagattaagaaaccatatttatttcttctttggtacaaccagagatgttacctcaaacctttaaaataaataatctcatcaataaaatttatgaatgccagagtattaaaattatttctttgctttcacatagaagcgctcaaaatattaacaggtttggggtaaagtacatacagttcaacaaaagttcaaggtgaagaaggaaaccaatacatgacgtaaagaaatcatttcgggagatgtagccctttcttatcactccagagacagcacatcgatgagattttaagcaccaattccattgaatgtagtggggtttcttcataactagtctagtaatcctctatataactgaaacaataatctgagaacaacttctaaatgaaaataactactgcaactgaggtaaaccaaacagttgtttttgtttattggcacagtggcccacgataagacacataggtatagcacactaaagctcaagatcctgggaacaggagtataaatttattcaagggaggtgtttggttttctttttttttttttaactgatgactctgctgtcttccctccaagggaaaggaaagagaacttactgaatagcaccgttcttctatatgtgattgtcaagtaggacttctgtaatcatactgaaggtaatacattgtaatcatgctgaaggtaatcatctttgccccagctttggatggtgtttctcacccaggctccttcaccaggcgtggttcatgcagacagccatgcagcagtaagcctttcaagggtcaggccctttgttaaatgctcgctgaccagcctgcatggtgcaggaggctggctcacagaaaccgggaagcccaggaggtcccgggggtccaggcactccaggaattcctgccacccctggggggcctcgctcaccgtctcggccatttctgccatagctggcagggcctgggtcacctgaaacacacagaagattgcacatgtgaacaggagaatcctcattgatgcaaactggcagagggcatggctcagcagcgctcagataaggggtttaacaaacgcttttggaaacgatggatgatgactggtgatgattggtgatgatcatgatgatgatgataataagatcccttccttggacttgggttttcatggaaattaaaagcagaaagagacctcagtgtctctaacccccatttccatcagtagagctgcaccgtgcaccatggtagcctccagccacaggtgcctattgagagctgaaatgtgatgaggccaaatggagatgaactaaggatcaaacacacctggattttaaagacttgatatgaaaaaatgtaaaatagttcattaataatttttgtgtctattacatgatgaaatgatcttttgcacacagtgggttaagtaaactatattattaaaattaatgtcacttgattatttttacctttttcatgtggctacttgatttaaaatcatacatgcaactcacatttgtggctcacattatatttcttttgaatgcaagtagcagtattccttacttctaagagttgagcaacatccgggcagggagaagtatagtttagcggttaaaaacacaggttttggagacaaatagctttacattctagccctatcatttatgaaaaatgtgacattagcaagtcactaatctctcagtttcttcatctacaagatgggataatgtcttcctaataattaaattcaggccaggtgcagtggctcatgcctgtaatcccagcactttgggaagccaaggtgggcagatcacctgaggtcaggagtttgagatcagcctggccaaaatggtgaaacctcatttctactaaaaatacaaaaaaattagccaggtatggtggtgtatgcctgtagtcctagctactcaggaggctgaggcaggagaattacttgcacccgggaggcagaggttgcagtgagccgagatcgcgccactgcactccagcctgggcgatagaacaagacttcgtcttaaaaataataataataataattctacaattggaagcacctgataaataggggctattattacaattattaagatattattgattaatgtcttttagaaggctgtgccatgtgccctacaaattttcatatttttctcatgaagggctgaccccaacatgaactttgcaatagcaggttctctgggggacatttcttgcttgtcttccttttgtcgtgtttaagggttgtatgttgccctcaatggggcacactctctgaggcacagcaccccataacaaagaggaatttctgctgaatgtttaccccagtgcactagcagcactttcacacaattattgcaaaagtggtgatgagaagtcagtgtaaaacaaattgtgtatgccaaaataatatagggatcctcattccatctcagccatcttaacctggtctttcagccaaaaagccggaagccaaatctacatgttcaactacatatttgcttatatttggttactctccttctttctctgtggtttttacttttctttttctatttcagttgtctttttatatgtcttttgttggtcttactgtagtaatatggtcttattcatatatatctcacatatttttagaaggaaggtaggttagagatcctgctttacataacatctcattcttcctctggtgcatacacttcgatccacacaaagcaatgtcatagggcaatatattaataagttttaagggagaataattatctttgaatttatccatctcaaagctatagataagcagagatataagtaattttccctaatttatcccatatactttcattcaactatacctagtaagtatgaagcagatcattatgtgttttcttttaatgatgaggtccctgagaaagcttctccctaatccacagcatctatagataaagctgtagcagaactatgcccttagcagcacctgttaagatccttaacaccagatgcagttaaaggtgaagttgatttttttaaggtttaaaagatgagccagatctaaatccgattttcatgcaccttatcactaggaatgttcccactgagacataccaggtgtgccttaaaatcaaatcaagtttaggagaaggaaatgcccaaagaagaggtagaaaaccaaatgagcacaggggctgggatggtcattgagatcaggggtgggcaaacttcagctcatgagctaaatcttgtttttgtagttttattagaacacgaccatggtcatttgtttacatattgtctgtggctgctttggcgtaccagggcagagttaaatagctgcaatatggtgcccatagccaaataatctgatccttcacaaataaagtttgctgatccctgatgttataaagaaacaagcctggattaagaaattcccccactgtttttaccagatgaaaacgtaaagtacaaatgcaatgaaatttggccactaatattccacgtaagtgttggggagaccaaagggaggagtgaggcctgtggtgagctggaaagtggatgcgggcagcagctcttctccagctaacagctgtcgtcggggaatacaggccagtgttgccagaacttctgataattttcaagagaggccaggaagctgagtctttaaataaatatctcccaatgtttaaatgttagcaactaattcaaatttttttcaacatttgtagagccagccaaaaaccttaagttttaagtaatttattctctaatacactaacaatattaaaaagcagaaggatagctttttagattttcacatttggttccccatcaacacacttcaggagaagtttttctttttcttttttaccttgctgagtttattccaaattgctgcttatcctctgaaggaagagtcgatgaagccatcctgtctacccttgatttattttatgaagcatgcatctcatccagttctgcctttggcaaatgcagcaatttaccctttggagcttttgatgatgtcatcatcatcatcatcatcatcatcatcaccacaaatgcttaatgagaatgctttctcttttccatgggcatacactatgctcattattgagcccatttttctcatgcataaactgagagttaggaaggtcaaataattgtccatagtcatatagccagaaatgaggacccttaaccactgcactaactgtattttcctacctattgatttttttaactctgtggaagggtgtggaggggtgtggcagggtgtgtgtgtgtgtgtgtgtgtggtcattttttttaattccttgggcctgagttgaccaggaagtagacagaggtacaaaaacaaagcacagtattgacttttgcagagctctaatgatcataagaaactaagatatttctctgaggttttgccctgtagaaataccagagaaaaaaaaacagccttaacatagcagattgtcaggctctggaaagccctgacccagggcctttgctctcatgtatgttctaaactatgtgggagcctcagttgggtgacactatgtccacagtccacatcactcaaaaagtgaagctgactcataataacggttcacaaaatgggcataaatggttagcccagcagctacattcatgaatatctatcaactgctttgtaactcttcagaaagagaaaacatgcatctaaagtgttattctgctctgcctgcctcatgtgtgtattacttacactaactgcctaatgattacatggttttctgaaatgtcaaggacctataaatatgttgaatattcccaatacaaagaaatgataaatgtttgagatgatggatatactaattaccctaatctggtcattatgtaatatttctattgaaacattactacatatcccataaatatgtataactattatatgtcaattaaaataaaataaaatatttaaaattattgctaaacgttttttttttaaacaaatgaatagctatgtcattctctataaaaccactagagggtagtcatgttacactgatggaagcccatctcggctggatcattctggaggcagcccctcacctaatacatgctgtggcgtaaaagggactgtgtatacagtcaaaacaaaaaaagtgaataattttcacattaaatagggtatttcataattaatccactggttatgtagactttttgtatgtaccaggagtttcttatatttcttgagcttaatgttgtggtatttgacaaagcagtatatgtttaaggaattataaactggtttatgtaaggcccagcaaccaaataaaacagctgcagcaatggaaatggaaaaattaggtactgaaaaacttagcccagaactgaatgtgtgcgtgtgtatttttccactcaatagtctcaagcaaagctcacctttctgtggactttgcacaagaaaaccaaatactcttataacctagcatagtccagcacaaagccagctacaacttccatgtccaagaggcaaaaagcaccttagctcacaagtcaccttcctagtgttcacattcaaatgatttgtcatttaatttatgttttgccctagtgagtgcacaaagaggaagtcaggactctttattattaataaatatgttcctttaaaattctcagagtgacgaggaactagtcccaatgggcaagtttggtggcagcagagagagtctttgagacaaccgaccaagcaataacactagctgacctgtggcacaaaactgaaggcgggggagactaaagttccagggattgctaatgtgatccacgtagctctgcaagagaggcagagaaagaagcgagacactcagcaattatgggacatgctcaattcacatgtctaggttgcaaagaaaaactaatcgtatgattagacagccagccaatcattctgtccactttgggaacatagactcaggaagcatgaatatctgtcttgttattacctgacagacttttgtcaggacatgaatttaagagtctgtattttctcaaatatattataaaaaaagggagcaacaataataacagttaaatttcactaaataatgtcagagtgtctgtttgccatatgccaggcactgttccaagagctttacatgtattaacatgtgcatatatgctctaaatacaaggtaggcatagtgattcccattcactgaagaggaaactgaagcacttcaaggtaaaagaatagtgcataagccctggcagcctggctccatgtctgcacttcttaaatattcacccagcctactcctggctgtgagaaacaaactagattgt

SEQ ID NO: 1268 - DNA, 2590 bp, Homo sapiens
actcgcagggagctcactcctcggcggtgccgcagccctgtccggactccactgcgcctctgaggggctcaaatacgaattcaagatccgtggccgttcacatggtttcaaggcacaatgagactcactggcccttggaaactttggctttggatgtcaatatttctgcttcctgcttccacttccgtgaccgttagggacaagacagaagagtcatgccctatcctgagaatagagggacatcagctgacatatgacaacataaacaaacttgaagtttcaggttttgatctaggagacagcttttctctaagacgtgcattttgtgaaagtgataaaacctgtttcaaattgggaagtgcacttcttattagagacactatgtaataagatatttcccaaaggccttcctgaggagtactcagtagctgccatgtttcgagtacgaagaaacgccaaaaaggaacggtggtttctgtggcaggttttaaaccagcagaatattccacagatttctatagtagttgatggtggaaagaaggtggtggaatttatgtttcaagccacagagggagatgtgttgaactacatttttagaaatcgagaactccgtcctttgtttgatcgtcagtggcacaaacttggcattagtatacaatcccaggtcatttcactttatatggattgtaatttaattgcgaggaggcagactgatgaaaaggacactgtggatttccatggacggacagttattgctacgcgagcttcagatggcaagcctgtggatattgaacttcaccaacttaaaatctactgcagtgcaaacctcatagctcaagaaacatgttgtgaaatatcagatactaagtgcccagagcaggatggctttggaaatattgcatcatcatgggtaactgctcatgccagtaaaatgtcttcatatctgccagcaaagcaggaacttaaagaccagtgccagtgcattccaaacaagggagaagcaggattaccaggagctccgggttcacctgggcagaaagggcataaaggagagccgggtgaaaatggtttacatggtgctccaggattccctggtcaaaagggagagcaaggttttgaaggcagcaaaggagaaactggtgaaaagggtgaacaaggagaaaaaggagatccagctctggctggccttaatggagaaaatggtttgaaaggtgacttgggtcctcatggtccacctggcccaaaaggagaaaagggagatacaggacccccaggaccaccagccttacctggttccctggggatacaaggcccccaaggtccacctggaaaagagggtcagaggggaagacgagggaaaacaggacctcccggaaaaccaggacccccaggaccacctggacctcctggaatacaaggaatacaccaaactcttggtggatattataacaaggataacaagggaaatgatgaacatgaagctggaggcctgaaaggagacaagggtgaaactggactaccaggatttccagggtctgttggccctaaaggacaaaaaggagaacctggagagccttttacaaaaggagaaaaaggagatagaggagaacctggggtaataggatcacagggagtaaagggtgaacctggagatcccggaccccctggtttaataggaagcccaggactaaagggtcagcaaggatctgcaggctccatgggacccagaggaccgccaggagatgttggattgccaggagaacatggtatcccaggaaaacaaggcattaaaggagaaaagggagatccgggtgggatcataggccctcccgggcttccaggtccaaaaggtgaggctggtcctccagggaaaagcctgccaggggaaccaggattagatggaaatcctggagcacctggtccacgtgggccaaagggtgaaagaggacttccaggtgttcacggttccccaggggacataggcccacaagggataggaattcctggcagaacaggcgcccaaggaccagctggagagccaggtattcagggtcctcgaggtctccctgggttgccaggaactccagggactccagggaatgatggagttccagggagagatggaaagccaggcctgccaggccccccaggtgacccgattgcacttcctctcttgggagacatcggtgctttgctcaagaatttctgtggcaactgccaagccagtgtcccagggctgaaaagcaacaaaggagaagaaggaggtgctggtgagcctggaaagtatgattccatggcccggaagggtgatatagggccacggggtcctccaggaatcccaggaagagagggaccaaagggaagcaaaggagagcggggctaccctgggatacctggggagaaaggcgatgagggtcttcaaggaattccaggcattccaggtgctccaggcccgactggaccccctggcttaatgggaagaactggacatcctggtcccacaggagcaaaaggtgaaaagggcagcgacggaccccctgggaaacccggaccacctggaccacctgtgagttgttctaggcttaaaatt

SEQ ID NO: 1269 - protein, 715 aa, Homo sapiens
MFRVRRNAKKERWFLWQVLNQQNIPQISIVVDGGKKVVEFMFQATEGDVLNYIFRNRELRPLFDRQWHKLGISIQSQVISLYMDCNLIARRQTDEKDTVDFHGRTVIATRASDGKPVDIELHQLKIYCSANLIAQETCCEISDTKCPEQDGFGNIASSWVTAHASKMSSYLPAKQELKDQCQCIPNKGEAGLPGAPGSPGQKGHKGEPGENGLHGAPGFPGQKGEQGFEGSKGETGEKGEQGEKGDPAQGENGLKGDLGPHGPPGPKGEKGDTGPPGPPALPGSLGIQGPQGPPGKEGQRGRRGKTGPPGKPGPPGPPGPPGIQGIHQTLGGYYNKDNKGNDEHEAGGLKGDKGETGLPGFPGSVGPKGQKGEPGEPFTKGEKGDRGEPGVIGSQGVKGEPGDPGPPGLIGSPGLKGQQGSAGSMGPRGPPGDVGLPGEHGIPGKQGIKGEKGDPGGIIGPPGLPGPKGEAGPPGKSLPGEPGLDGNPGAPGPRGPKGERGLPGVHGSPGDIGPQGIGIPGRTGAQGPAGEPGIQGPRGLPGLPGTPGTPGNDGVPGRDGKPGLPGPPGDPIALPLLGDIGALLKNFCGNCQASVPGLKSNKGEEGGAGEPGKYDSMARKGDIGPRGPPGIPGREGPKGSKGERGYPGIPGEKGDEGLQGIPGIPGAPGPTGPPGLMGRTGHPGPTGAKGEKGSDGPPGKPGPPGPPVSCSRLKI

SEQ ID NO: 1270 - DNA, 8737 bp, Homo sapiens
actcgcagggagctcactcctcggcggtgccgcagccctgtccggactccactgcgcctctgaggggctcaaatacgaattcaagatccgtggccgttcacatggtttcaaggcacaatgagactcactggcccttggaaactttggctttggatgtcaatatttctgcttcctgcttccacttccgtgaccgttagggacaagacagaagagtcatgccctatcctgagaatagagggacatcagctgacatatgacaacataaacaaacttgaagtttcaggttttgatctaggagacagcttttctctaagacgtgcattttgtgaaagtgataaaacctgtttcaaattgggaagtgcacttcttattagagacactatgtaataagatatttcccaaaggccttcctgaggagtactcagtagctgccatgtttcgagtacgaagaaacgccaaaaaggaacggtggtttctgtggcaggttttaaaccagcagaatattccacagatttctatagtagttgatggtggaaagaaggtggtggaatttatgtttcaagccacagagggagatgtgttgaactacatttttagaaatcgagaactccgtcctttgtttgatcgtcagtggcacaaacttggcattagtatacaatcccaggtcatttcactttatatggattgtaatttaattgcgaggaggcagactgatgaaaaggacactgtggatttccatggacggacagttattgctacgcgagcttcagatggcaagcctgtggatattgaacttcaccaacttaaaatctactgcagtgcaaacctcatagctcaagaaacatgttgtgaaatatcagatactaagtgcccagagcaggatggctttggaaatattgcatcatcatgggtaactgctcatgccagtaaaatgtcttcatatctgccagcaaagcaggaacttaaagaccagtgccagtgcattccaaacaagggagaagcaggattaccaggagctccgggttcacctgggcagaaagggcataaaggagagccgggtgaaaatggtttacatggtgctccaggattccctggtcaaaagggagagcaaggttttgaaggcagcaaaggagaaactggtgaaaagggtgaacaaggagaaaaaggagatccagctctggctggccttaatggagaaaatggtttgaaaggtgacttgggtcctcatggtccacctggcccaaaaggagaaaagggagatacaggacccccaggaccaccagccttacctggttccctggggatacaaggcccccaaggtccacctggaaaagagggtcagaggggaagacgagggaaaacaggacctcccggaaaaccaggacccccaggaccacctggacctcctggaatacaaggaatacaccaaactcttggtggatattataacaaggataacaagggaaatgatgaacatgaagctggaggcctgaaaggagacaagggtgaaactggactaccaggatttccagggtctgttggccctaaaggacaaaaaggagaacctggagagccttttacaaaaggagaaaaaggagatagaggagaacctggggtaataggatcacagggagtaaagggtgaacctggagatcccggaccccctggtttaataggaagcccaggactaaagggtcagcaaggatctgcaggctccatgggacccagaggaccgccaggagatgttggattgccaggagaacatggtatcccaggaaaacaaggcattaaaggagaaaagggagatccgggtgggatcataggccctcccgggcttccaggtccaaaaggtgaggctggtcctccagggaaaagcctgccaggggaaccaggattagatggaaatcctggagcacctggtccacgtgggccaaagggtgaaagaggacttccaggtgttcacggttccccaggggacataggcccacaagggataggaattcctggcagaacaggcgcccaaggaccagctggagagccaggtattcagggtcctcgaggtctccctgggttgccaggaactccagggactccagggaatgatggagttccagggagagatggaaagccaggcctgccaggccccccaggtgacccgattgcacttcctctcttgggagacatcggtgctttgctcaagaatttctgtggcaactgccaagccagtgtcccagggctgaaaagcaacaaaggagaagaaggaggtgctggtgagcctggaaagtatgattccatggcccggaagggtgatatagggccacggggtcctccaggaatcccaggaagagagggaccaaagggaagcaaaggagagcggggctaccctgggatacctggggagaaaggcgatgagggtcttcaaggaattccaggcattccaggtgctccaggcccgactggaccccctggcttaatgggaagaactggacatcctggtcccacaggagcaaaaggtgaaaagggcagcgacggaccccctgggaaacccggaccacctggaccacctggtattccatttaatgaacgaaacggcatgagcagtttatataaaattaagggaggtgtgaatgttcccagttacccagggccacccggtcctcctggcccaaaaggcgatcctggcccagtgggagagcctggtgcaatggggttgccaggattagaaggatttccaggtgtaaagggagatcgaggcccagcaggtcccccaggaatagcagggatgtcgggaaaacctggtgccccagggcctccaggagttccaggggaaccgggtgagagaggacctgttggagatataggtttccctggaccagaaggaccctcaggaaagccaggaataaatggaaaagatggaataccaggtgctcagggcatcatgggtaagcctggagacagaggccccaaaggagaacgtggtgatcaggggattccaggagacagaggctcacaaggtgaacggggaaaaccaggccttacaggcatgaagggggccatcggtcctatgggtccaccaggaaacaagggctccatgggatcccctggccaccaaggccctccaggctctccaggcatccctggcattccggctgatgcagtttcatttgaagaaataaagaagtatattaatcaagaggtcctaaggatttttgaagagaggatggctgtattcctatcccagctcaagctgccagcagcaatgttggctgcccaagcttatgggagacctgggccaccagggaaggatgggttgcctgggccaccaggagaccctggaccccaaggctacagaggacagaagggagaaagaggtgaacctggaattgggctgccagggagtccaggtcttcctgggacttcagctctgggtttgccaggctcaccaggtgccccaggcccccagggccccccaggacccagtggaagatgtaacccagaagattgcctctatcctgtgtctcatgcccatcagcgcacaggtgggaattgaacacacctgaagaagacttggttcctggtaacatttccttgccactggagctctcttaataccgtcaaaccctcatcatctgtgggttgctttttttttttttttttttttttgggagtaagccaggcattaaaagcaaccgtttgaatcctattcctatagcaattgcaaatcagcattttttgatttttcccaaattcattccatatgttttgctttacaattgctatgatttttactcagagttttatatgaaatatgcaagtaaatcttatcgttagttcttcttcaaaaggaaattgcatcttgtgacttagtagactgatgatgatatccattttgtagactcatcaacatgtggttggcctttgatttctgaattttaaagtttcagacttatcttttccttggtgtttaaatttactatcattgctaaacatctcgtcaacttttttgatatagtgcattgctcctgttgaatgttttttgactactttttataacttaagaatttttataccatctacatctatcctacttatgcagaaaaataggcaataagaacttcattttacaatttatgttttcaaaaaaaaaatgcaggaaactgttttatcagggagcccaaacacccagcatagccaactactgaaatgattttgttaattctgtataatgagctcaattcaaagcaatcaccactggcatgaataagtactgcatgaaaagggagtatcaaattccagttttgtatgagttctgcaaaaaaagcctaatattctgtggtcccctcactcagtctctcatttggtaaacagaaagctgttttccctacaaggtgcttggtggtgaagccaccaagctgtctttggtactcttaaagcttcagtggcctagcaagatctttgggcccttgtatccattatccttatgacctcatcaccctcagactttaagacaagaagccaccatcaaaacaaaggatgggatacgtaaagaatggactcacttgtcctagaagatgaatgtgtagtgtcagcaaatgcatgttaagaaggtgaagcccaaaagctcttaaggagaattgtatttctccagaagctgcagcaagaggtacagctcaacaaaggaaaaccacaggactggatatgcaactagtgctcagaccaaagagttcacacccactctaaaaccatgtcctctgaaaagaaacaaaaatacagtgatcatcaaatgcctaaacagtctttctgttggttagctgtacattcattgaggaactgttgattggcaggcactgattctctagaacactgggcatgaggatgttgcagaaatctagatggtgggtcccacagatgtgagaacatgctgcaagagcctgccagccacagcaatcaggactcacagctcttcaaggagcagtgcagatttcaatttggctaaaacaggatgattgcttttgtctgtttactgaaaaatgagtttagaaaggctagcccactgacattggaaaaagctgtgaacagagttgtgtctgaggaatgtgcctaatttaaggcagggtttgttccaatgcatccgtgatttgaaccggttttcattatagattaatgaactgctggtcaggtactgtctacaatggctgtgcatacctataacattttaggtatttcatattgaattatgctgtatatttcaattccaagtttatttattttccaaggttattttatttattgtaagcattttgacattgattttttttttttcgttttctttcttgtgcaatacctacaatggtgctgtgttttaaacttacacaattgggacatacgtatgtgttttcttagtaaaatggtaatttatcccgaaaaagtgtacatagatctaaaatttggtgctatgtgtatatcttgagcttttaatttgttgaattttctaaacgcttacaacttatctgccactcatattaatttacttgaatttgtcataaagctaaatattttatatgttttcaaagattattttttcatattaataggttgtttatctttttgcctgtttgctaatttaaaaatatttattttatcattttaatgttttcatggacttttttgctgatggtaatcaactttttttgttttttggtttttgagttgttcttgtcatagacataaaaagacaattcattttcttgttttattaactctgttcatttttattctacaaaatatgtcatgcattctttcttatgaattgtatatttagaaatctttctaaataccattaaggcttgactggttaattcctatttcaaggatttggatttattcaggtaatttgatgggatggggaaatataatattgtgtgatgcatattacaaagtggacttgtcacaatgacacaaactcattttttgtaactgggaaatatgactaaatttgacgtaactagagaaacaaggctgtatccacatggtacaagcctttctcaccctactctattatttaccttcagatactttttcctgcctcagctctgtacacatgatatgcaacaaagggcagcaagaaatgctgggtccacctaatttaacacaaaatgaagttgagattcggcagttgcccaattcctttaataaaaagaaactaaataatttgggccccaaagtagggtgggaagttttcctctaaatgacttgatggttgccaaatcccttgcaccattttattccattccaaaacatgtgtttatttccacatagatgttaatgatgttcaaagcaggggagaagaattattcaatttcatgaataactcttgtttgcactccagaaaacaacatacatgtttaaatacaaaataattatgggccatgacgacgattaatattaaaactgtgatttccatatacaagtatgtttgagttccaatcttacattttataccaagttcaaaacactttcagatagaagtctttctatgcaaagattaaagtatgacttcaattcatatttatggcctttggaatccaaagaaaaacagaagaataattcatggatttgttcattgttctttccaactgaaggcagtaaccattacttctaaccgtaacacaaacacagcaagttttaaccttttaaacttttcactttgtgagcaaagtaaccccataagtttatttccctatttcatggtattgtttaaactttaaaattttagtcacttaaagaacttaagcaattatattaaaatacgttgtctgtgaaaattatcatttgatatttggcttataaagtaatttttatgaatctgttttatgagttaggtaagatttagcctttctgcagtctgtctcatctgttgggaacctgtgatatacctccatttgtccacaagatggtgtttaaaacaatttgttcagaagaactgagcaaactaacagaaatacaaggctacgaacagtttagtggacaactaaatcagactcttgcctttgcacttttttttaacttttgtagataatttttgttaatttgttttgttaatttatgtttttcctaattttaagcatctttatgaaacaggcacagtaccctttggtttgttgactgttttgattttatttcttcggtggatatatatgtacttatacacttagttaacatgcagattaactagtcataactgtttatacaccactctcatattttagtgatcaatatgaagacagctaaataattatcctactttttagacaggacagatactctctttcaacagacaagaaaaaagatttagcttatcacaagaagcagacaatttataaaactacacaatgtctaaactctatgttgctcagtgtacttaaaattttacagttatatttgtataacgtttatatttttctagaatacatcactatttacaaaagtacgattagaaacactgttttttttaagtaccgtttttattttcgtaacactaataatacactgggattgagaatttctgttaagtgttttgctgacgttgttttaatgaatactcaaaaaagctttgcagatttgtccattgctcttgttcttaaattatttttcatacttgtctgtatccaccttctgaagacacacaagtgtttactgtcgcagtttcccagcgttatttcttaatacttgagtgttgacacatttttgtaccatcccccttttgtaccatctctgctcacaaagattatatgcaggctttgaagaggaggagatgcagaagataattgaatttgtatcttgtatgcctatgtaattcaaagtgacttagtccattgaattgtgttcatttattagttggctggttaagatagcattaattatcttaaatttattcaactactaaaagtctcaggcaataggacaaatgagtgtcatcatttttattgtgtggcatacttggagctataatccaaacgttttactcaacaaaataatgctagagtaactgatcaatttggttaaattgaatgaagaaccaagtgaacacagagaaaacttattcggacaagtagacccagcacagcaaaaatttgtctgaaagataagacaagcttataagaccaaagctaagtctaagaaaatctaaatggaaaaaaaattgcgtgttcagatccaatagtgagtgatgtggtacaactggaggagttagctacttgcttcatgaatttgtcaaaagtgaatactaataaagtgggaggcttcactaaatgagggggtaaataagatttaagtttatcagaagtgtgtgtattgtgtgaccatactaagcttctgggtgtaagtaaagatgctggctattttacaactttttattgtattgtgttatgcaaagtacattttggagataaatgtttttcagcacattaatgtctttaaattcaggttgtattgggtgtattttacaactatttatttttaaataacatttagggtgtgttttcccccattttgtttgttctctatcttacctcatcaaactctttacgatttaattgaatatactcatgttaagtgcaatggcattagttttattcaaaatcccacatgggcataatgctttgaggccttgattcctacatgttcattatgcataatgagcttgtcacctatctcagcaataaaggttctgacccta

SEQ ID NO: 1271 - protein, 1034 aa, Homo sapiens
MFRVRRNAKKERWFLWQVLNQQNIPQISIVVDGGKKVVEFMFQATEGDVLNYIFRNRELRPLFDRQWHKLGISIQSQVISLYMDCNLIARRQTDEKDTVDFHGRTVIATRASDGKPVDIELHQLKIYCSANLIAQETCCEISDTKCPEQDGFGNIASSWVTAHASKMSSYLPAKQELKDQCQCIPNKGEAGLPGAPGSPGQKGHKGEPGENGLHGAPGFPGQKGEQGFEGSKGETGEKGEQGEKGDPAQGENGLKGDLGPHGPPGPKGEKGDTGPPGPPALPGSLGIQGPQGPPGKEGQRGRRGKTGPPGKPGPPGPPGPPGIQGIHQTLGGYYNKDNKGNDEHEAGGLKGDKGETGLPGFPGSVGPKGQKGEPGEPFTKGEKGDRGEPGVIGSQGVKGEPGDPGPPGLIGSPGLKGQQGSAGSMGPRGPPGDVGLPGEHGIPGKQGIKGEKGDPGGIIGPPGLPGPKGEAGPPGKSLPGEPGLDGNPGAPGPRGPKGERGLPGVHGSPGDIGPQGIGIPGRTGAQGPAGEPGIQGPRGLPGLPGTPGTPGNDGVPGRDGKPGLPGPPGDPIALPLLGDIGALLKNFCGNCQASVPGLKSNKGEEGGAGEPGKYDSMARKGDIGPRGPPGIPGREGPKGSKGERGYPGIPGEKGDEGLQGIPGIPGAPGPTGPPGLMGRTGHPGPTGAKGEKGSDGPPGKPGPPGPPGIPFNERNGMSSLYKIKGGVNVPSYPGPPGPPGPKGDPGPVGEPGAMGLPGLEGFPGVKGDRGPAGPPGIAGMSGKPGAPGPPGVPGEPGERGPVGDIGFPGPEGPSGKPGINGKDGIPGAQGIMGKPGDRGPKGERGDQGIPGDRGSQGERGKPGLTGMKGAIGPMGPPGNKGSMGSPGHQGPPGSPGIPGIPADAVSFEEIKKYINQEVLRIFEERMAVFLSQLKLPAAMLAAQAYGRPGPPGKDGLPGPPGDPGPQGYRGQKGERGEPGIGLPGSPGLPGTSALGLPGSPGAPGPQGPPGPSGRCNPEDCLYPVSHAHQRTGGN

SEQ ID NO: 1272 - DNA, 8733 bp, Homo sapiens
actcgcagggagctcactcctcggcggtgccgcagccctgtccggactccactgcgcctctgaggggctcaaatacgaattcaagatccgtggccgttcacatggtttcaaggcacaatgagactcactggcccttggaaactttggctttggatgtcaatatttctgcttcctgcttccacttccgtgaccgttagggacaagacagaagagtcatgccctatcctgagaatagagggacatcagctgacatatgacaacataaacaaacttgaagtttcaggttttgatctaggagacagcttttctctaagacgtgcattttgtgaaagtgataaaacctgtttcaaattgggaagtgcacttcttattagagacactattaagatatttcccaaaggccttcctgaggagtactcagtagctgccatgtttcgagtacgaagaaacgccaaaaaggaacggtggtttctgtggcaggttttaaaccagcagaatattccacagatttctatagtagttgatggtggaaagaaggtggtggaatttatgtttcaagccacagagggagatgtgttgaactacatttttagaaatcgagaactccgtcctttgtttgatcgtcagtggcacaaacttggcattagtatacaatcccaggtcatttcactttatatggattgtaatttaattgcgaggaggcagactgatgaaaaggacactgtggatttccatggacggacagttattgctacgcgagcttcagatggcaagcctgtggatattgaacttcaccaacttaaaatctactgcagtgcaaacctcatagctcaagaaacatgttgtgaaatatcagatactaagtgcccagagcaggatggctttggaaatattgcatcatcatgggtaactgctcatgccagtaaaatgtcttcatatctgccagcaaagcaggaacttaaagaccagtgccagtgcattccaaacaagggagaagcaggattaccaggagctccgggttcacctgggcagaaagggcataaaggagagccgggtgaaaatggtttacatggtgctccaggattccctggtcaaaagggagagcaaggttttgaaggcagcaaaggagaaactggtgaaaagggtgaacaaggagaaaaaggagatccagctctggctggccttaatggagaaaatggtttgaaaggtgacttgggtcctcatggtccacctggcccaaaaggagaaaagggagatacaggacccccaggaccaccagccttacctggttccctggggatacaaggcccccaaggtccacctggaaaagagggtcagaggggaagacgagggaaaacaggacctcccggaaaaccaggacccccaggaccacctggacctcctggaatacaaggaatacaccaaactcttggtggatattataacaaggataacaagggaaatgatgaacatgaagctggaggcctgaaaggagacaagggtgaaactggactaccaggatttccagggtctgttggccctaaaggacaaaaaggagaacctggagagccttttacaaaaggagaaaaaggagatagaggagaacctggggtaataggatcacagggagtaaagggtgaacctggagatcccggaccccctggtttaataggaagcccaggactaaagggtcagcaaggatctgcaggctccatgggacccagaggaccgccaggagatgttggattgccaggagaacatggtatcccaggaaaacaaggcattaaaggagaaaagggagatccgggtgggatcataggccctcccgggcttccaggtccaaaaggtgaggctggtcctccagggaaaagcctgccaggggaaccaggattagatggaaatcctggagcacctggtccacgtgggccaaagggtgaaagaggacttccaggtgttcacggttccccaggggacataggcccacaagggataggaattcctggcagaacaggcgcccaaggaccagctggagagccaggtattcagggtcctcgaggtctccctgggttgccaggaactccagggactccagggaatgatggagttccagggagagatggaaagccaggcctgccaggccccccaggtgacccgattgcacttcctctcttgggagacatcggtgctttgctcaagaatttctgtggcaactgccaagccagtgtcccagggctgaaaagcaacaaaggagaagaaggaggtgctggtgagcctggaaagtatgattccatggcccggaagggtgatatagggccacggggtcctccaggaatcccaggaagagagggaccaaagggaagcaaaggagagcggggctaccctgggatacctggggagaaaggcgatgagggtcttcaaggaattccaggcattccaggtgctccaggcccgactggaccccctggcttaatgggaagaactggacatcctggtcccacaggagcaaaaggtgaaaagggcagcgacggaccccctgggaaacccggaccacctggaccacctggtattccatttaatgaacgaaacggcatgagcagtttatataaaattaagggaggtgtgaatgttcccagttacccagggccacccggtcctcctggcccaaaaggcgatcctggcccagtgggagagcctggtgcaatggggttgccaggattagaaggatttccaggtgtaaagggagatcgaggcccagcaggtcccccaggaatagcagggatgtcgggaaaacctggtgccccagggcctccaggagttccaggggaaccgggtgagagaggacctgttggagatataggtttccctggaccagaaggaccctcaggaaagccaggaataaatggaaaagatggaataccaggtgctcagggcatcatgggtaagcctggagacagaggccccaaaggagaacgtggtgatcaggggattccaggagacagaggctcacaaggtgaacggggaaaaccaggccttacaggcatgaagggggccatcggtcctatgggtccaccaggaaacaagggctccatgggatcccctggccaccaaggccctccaggctctccaggcatccctggcattccggctgatgcagtttcatttgaagaaataaagaagtatattaatcaagaggtcctaaggatttttgaagagaggatggctgtattcctatcccagctcaagctgccagcagcaatgttggctgcccaagcttatgggagacctgggccaccagggaaggatgggttgcctgggccaccaggagaccctggaccccaaggctacagaggacagaagggagaaagaggtgaacctggaattgggctgccagggagtccaggtcttcctgggacttcagctctgggtttgccaggctcaccaggtgccccaggcccccagggccccccaggacccagtggaagatgtaacccagaagattgcctctatcctgtgtctcatgcccatcagcgcacaggtgggaattgaacacacctgaagaagacttggttcctggtaacatttccttgccactggagctctcttaataccgtcaaaccctcatcatctgtgggttgctttttttttttttttttttttttgggagtaagccaggcattaaaagcaaccgtttgaatcctattcctatagcaattgcaaatcagcattttttgatttttcccaaattcattccatatgttttgctttacaattgctatgatttttactcagagttttatatgaaatatgcaagtaaatcttatcgttagttcttcttcaaaaggaaattgcatcttgtgacttagtagactgatgatgatatccattttgtagactcatcaacatgtggttggcctttgatttctgaattttaaagtttcagacttatcttttccttggtgtttaaatttactatcattgctaaacatctcgtcaacttttttgatatagtgcattgctcctgttgaatgttttttgactactttttataacttaagaatttttataccatctacatctatcctacttatgcagaaaaataggcaataagaacttcattttacaatttatgttttcaaaaaaaaaatgcaggaaactgttttatcagggagcccaaacacccagcatagccaactactgaaatgattttgttaattctgtataatgagctcaattcaaagcaatcaccactggcatgaataagtactgcatgaaaagggagtatcaaattccagttttgtatgagttctgcaaaaaaagcctaatattctgtggtcccctcactcagtctctcatttggtaaacagaaagctgttttccctacaaggtgcttggtggtgaagccaccaagctgtctttggtactcttaaagcttcagtggcctagcaagatctttgggcccttgtatccattatccttatgacctcatcaccctcagactttaagacaagaagccaccatcaaaacaaaggatgggatacgtaaagaatggactcacttgtcctagaagatgaatgtgtagtgtcagcaaatgcatgttaagaaggtgaagcccaaaagctcttaaggagaattgtatttctccagaagctgcagcaagaggtacagctcaacaaaggaaaaccacaggactggatatgcaactagtgctcagaccaaagagttcacacccactctaaaaccatgtcctctgaaaagaaacaaaaatacagtgatcatcaaatgcctaaacagtctttctgttggttagctgtacattcattgaggaactgttgattggcaggcactgattctctagaacactgggcatgaggatgttgcagaaatctagatggtgggtcccacagatgtgagaacatgctgcaagagcctgccagccacagcaatcaggactcacagctcttcaaggagcagtgcagatttcaatttggctaaaacaggatgattgcttttgtctgtttactgaaaaatgagtttagaaaggctagcccactgacattggaaaaagctgtgaacagagttgtgtctgaggaatgtgcctaatttaaggcagggtttgttccaatgcatccgtgatttgaaccggttttcattatagattaatgaactgctggtcaggtactgtctacaatggctgtgcatacctataacattttaggtatttcatattgaattatgctgtatatttcaattccaagtttatttattttccaaggttattttatttattgtaagcattttgacattgattttttttttttcgttttctttcttgtgcaatacctacaatggtgctgtgttttaaacttacacaattgggacatacgtatgtgttttcttagtaaaatggtaatttatcccgaaaaagtgtacatagatctaaaatttggtgctatgtgtatatcttgagcttttaatttgttgaattttctaaacgcttacaacttatctgccactcatattaatttacttgaatttgtcataaagctaaatattttatatgttttcaaagattattttttcatattaataggttgtttatctttttgcctgtttgctaatttaaaaatatttattttatcattttaatgttttcatggacttttttgctgatggtaatcaactttttttgttttttggtttttgagttgttcttgtcatagacataaaaagacaattcattttcttgttttattaactctgttcatttttattctacaaaatatgtcatgcattctttcttatgaattgtatatttagaaatctttctaaataccattaaggcttgactggttaattcctatttcaaggatttggatttattcaggtaatttgatgggatggggaaatataatattgtgtgatgcatattacaaagtggacttgtcacaatgacacaaactcattttttgtaactgggaaatatgactaaatttgacgtaactagagaaacaaggctgtatccacatggtacaagcctttctcaccctactctattatttaccttcagatactttttcctgcctcagctctgtacacatgatatgcaacaaagggcagcaagaaatgctgggtccacctaatttaacacaaaatgaagttgagattcggcagttgcccaattcctttaataaaaagaaactaaataatttgggccccaaagtagggtgggaagttttcctctaaatgacttgatggttgccaaatcccttgcaccattttattccattccaaaacatgtgtttatttccacatagatgttaatgatgttcaaagcaggggagaagaattattcaatttcatgaataactcttgtttgcactccagaaaacaacatacatgtttaaatacaaaataattatgggccatgacgacgattaatattaaaactgtgatttccatatacaagtatgtttgagttccaatcttacattttataccaagttcaaaacactttcagatagaagtctttctatgcaaagattaaagtatgacttcaattcatatttatggcctttggaatccaaagaaaaacagaagaataattcatggatttgttcattgttctttccaactgaaggcagtaaccattacttctaaccgtaacacaaacacagcaagttttaaccttttaaacttttcactttgtgagcaaagtaaccccataagtttatttccctatttcatggtattgtttaaactttaaaattttagtcacttaaagaacttaagcaattatattaaaatacgttgtctgtgaaaattatcatttgatatttggcttataaagtaatttttatgaatctgttttatgagttaggtaagatttagcctttctgcagtctgtctcatctgttgggaacctgtgatatacctccatttgtccacaagatggtgtttaaaacaatttgttcagaagaactgagcaaactaacagaaatacaaggctacgaacagtttagtggacaactaaatcagactcttgcctttgcacttttttttaacttttgtagataatttttgttaatttgttttgttaatttatgtttttcctaattttaagcatctttatgaaacaggcacagtaccctttggtttgttgactgttttgattttatttcttcggtggatatatatgtacttatacacttagttaacatgcagattaactagtcataactgtttatacaccactctcatattttagtgatcaatatgaagacagctaaataattatcctactttttagacaggacagatactctctttcaacagacaagaaaaaagatttagcttatcacaagaagcagacaatttataaaactacacaatgtctaaactctatgttgctcagtgtacttaaaattttacagttatatttgtataacgtttatatttttctagaatacatcactatttacaaaagtacgattagaaacactgttttttttaagtaccgtttttattttcgtaacactaataatacactgggattgagaatttctgttaagtgttttgctgacgttgttttaatgaatactcaaaaaagctttgcagatttgtccattgctcttgttcttaaattatttttcatacttgtctgtatccaccttctgaagacacacaagtgtttactgtcgcagtttcccagcgttatttcttaatacttgagtgttgacacatttttgtaccatcccccttttgtaccatctctgctcacaaagattatatgcaggctttgaagaggaggagatgcagaagataattgaatttgtatcttgtatgcctatgtaattcaaagtgacttagtccattgaattgtgttcatttattagttggctggttaagatagcattaattatcttaaatttattcaactactaaaagtctcaggcaataggacaaatgagtgtcatcatttttattgtgtggcatacttggagctataatccaaacgttttactcaacaaaataatgctagagtaactgatcaatttggttaaattgaatgaagaaccaagtgaacacagagaaaacttattcggacaagtagacccagcacagcaaaaatttgtctgaaagataagacaagcttataagaccaaagctaagtctaagaaaatctaaatggaaaaaaaattgcgtgttcagatccaatagtgagtgatgtggtacaactggaggagttagctacttgcttcatgaatttgtcaaaagtgaatactaataaagtgggaggcttcactaaatgagggggtaaataagatttaagtttatcagaagtgtgtgtattgtgtgaccatactaagcttctgggtgtaagtaaagatgctggctattttacaactttttattgtattgtgttatgcaaagtacattttggagataaatgtttttcagcacattaatgtctttaaattcaggttgtattgggtgtattttacaactatttatttttaaataacatttagggtgtgttttcccccattttgtttgttctctatcttacctcatcaaactctttacgatttaattgaatatactcatgttaagtgcaatggcattagttttattcaaaatcccacatgggcataatgctttgaggccttgattcctacatgttcattatgcataatgagcttgtcacctatctcagcaataaaggttctgacccta

SEQ ID NO: 1273 - protein, 1138 aa, Homo sapiens
MRLTGPWKLWLWMSIFLLPASTSVTVRDKTEESCPILRIEGHQLTYDNINKLEVSGFDLGDSFSLRRAFCESDKTCFKLGSALLIRDTIKIFPKGLPEEYSVAAMFRVRRNAKKERWFLWQVLNQQNIPQISIVVDGGKKVVEFMFQATEGDVLNYIFRNRELRPLFDRQWHKLGISIQSQVISLYMDCNLIARRQTDEKDTVDFHGRTVIATRASDGKPVDIELHQLKIYCSANLIAQETCCEISDTKCPEQDGFGNIASSWVTAHASKMSSYLPAKQELKDQCQCIPNKGEAGLPGAPGSPGQKGHKGEPGENGLHGAPGFPGQKGEQGFEGSKGETGEKGEQGEKGDPAQGENGLKGDLGPHGPPGPKGEKGDTGPPGPPALPGSLGIQGPQGPPGKEGQRGRRGKTGPPGKPGPPGPPGPPGIQGIHQTLGGYYNKDNKGNDEHEAGGLKGDKGETGLPGFPGSVGPKGQKGEPGEPFTKGEKGDRGEPGVIGSQGVKGEPGDPGPPGLIGSPGLKGQQGSAGSMGPRGPPGDVGLPGEHGIPGKQGIKGEKGDPGGIIGPPGLPGPKGEAGPPGKSLPGEPGLDGNPGAPGPRGPKGERGLPGVHGSPGDIGPQGIGIPGRTGAQGPAGEPGIQGPRGLPGLPGTPGTPGNDGVPGRDGKPGLPGPPGDPIALPLLGDIGALLKNFCGNCQASVPGLKSNKGEEGGAGEPGKYDSMARKGDIGPRGPPGIPGREGPKGSKGERGYPGIPGEKGDEGLQGIPGIPGAPGPTGPPGLMGRTGHPGPTGAKGEKGSDGPPGKPGPPGPPGIPFNERNGMSSLYKIKGGVNVPSYPGPPGPPGPKGDPGPVGEPGAMGLPGLEGFPGVKGDRGPAGPPGIAGMSGKPGAPGPPGVPGEPGERGPVGDIGFPGPEGPSGKPGINGKDGIPGAQGIMGKPGDRGPKGERGDQGIPGDRGSQGERGKPGLTGMKGAIGPMGPPGNKGSMGSPGHQGPPGSPGIPGIPADAVSFEEIKKYINQEVLRIFEERMAVFLSQLKLPAAMLAAQAYGRPGPPGKDGLPGPPGDPGPQGYRGQKGERGEPGIGLPGSPGLPGTSALGLPGSPGAPGPQGPPGPSGRCNPEDCLYPVSHAHQRTGGN

SEQ ID NO: 1274 - DNA, 352938 bp, Mus musculus
  misc_feature (1)...(352938): n = A,T,C or G
ttaatagcttttaaaatttattataattactctaagcctgtatattttaattatttattgctttaaaattatatgcatgttaattatgtaaatgatatgttacattatattttctttctgttttttaagttagtcacacacatgtgagtgtgtgcccatgtgtgtgtgtgtgtctgagtcagtgtgtgagtgtgtctgtgtgtgtgtgtagaggccagaggataactttcaggagtcagttctctatttttaccacgtggatctcaggtatcaaactcacctgcatcaccaggcttggaggtgcccctacctgctaaactgtctcattggctcttgattgttttgtaaagatgcagtctcactatgcagccatagttggccttgaacttgaaatatttctgccccagccttctaagtgctgagattacaggcttgtgctgtaacacccagtgttcactctgatagttcacacattaacttttgtttctttgacgggtgcttatttttttctgattttttttaatagctctgaatttgccatatgaagttgtgttttgttggggaataaaagaaaatagcatatgtggaaatttgggattattgttttaattattgactatgtacacatttcgaataatgtgactaaggacaaagtggttgtgttaagaaacaacaaagtatcttagagtatggcattgtgagtgtgtctatgtgtatgttccaggaattgacttgccaagggtcttagaacagaataaatatttgagaaattcttgtttgattggaaattatttttccacagttccctgtttaattaattaattaattaattaattaacttttttgcagtactagggactgaatcaagggtctcccacatgctagccaagtgctctcccactcaaccacactcccaggcttccttcttacttagtcctttgactatcttaagaagcttgtcgttcttcacatttacaagtgctgaactaagcctgtctgaatgctctcaacggcataaaagaattacttgcatgtctgtacacctgagtggcagatcgaatcagagctgaatctagggtgaggtgtgtgtgtgtgtgtgcatgttcatgtttgtgtgtgatttttgttgttgtttgcttgatttttatatctagggattggaatgtctttgtttgtttgtttgtttttccagacagggtttctgtgtagccctggctgtcctggaattcactttgtagaccaggctggcctcgaactcagaaatctgcctgcctctgcctcccaagtgctgggattaaaggcatgcgccaccactgcccagcgcccagtgggatatctttttccagtgtaattctttattcaggaaagagacatgataatgacgtttgtttgtttgtttgttttttggctaacttttattctgtgtttcgtgttttctgaaacttttcttgatgtggagggtggggaatctcaatatcttcctttcacaacccacttggcaatattattcagccctgcgtttgaaggctggaggtagtcttcggaactttctaatttgatgattcgttttcttttctttctttctttctttttttttttttaaagctgaggttgaagtggtaataagattctgtgggtcaggatcagttgacttccttcaggaaaggtgagcaccccttcgtaatannnnnnnnnnnnnnnnnnnncccagcaaccagtgggatatctttttcccagtgtaattctttattcaggaaagagaccatgataatgacatttgtttgtttgtttgttttttgggctaacttttaattctgtgtttcgtgttttctgaaacttttccttgatgtggagggtggagaatctcaatatcttcctttcacaacccacttggcaatattattcagccctgcttttgaaggctggaggtagtcttcggaactttctaatttgatgattcttcttttcttttcttttcttttcttttcttttcttttcttttcttttcttttcttttcttttcctttcctttcctttcctttcttttcttttcttttcttttctttttttaaagttgaggttgaagtggtaataagattctgtgagtcaggatcagttgacttccttcaggaaaggtgagcaccccttcgtaatataaaggaggaggtgatcactacactcaaaggagcagctggaaacatctggccataaagcagagagacccaaagccagatccagaatatgcaagaagggcagttctccagacagggcagatacctaactacctaactggtaaataagcaggcatccattttcttttctttccatttctttccttttctttttttctttttattcaaaaggagttgcaaaaacatctgttcatccatttgactaggtactttgtaaaggcttgccatgaagccaataaaatgcaattatcctacgtaataagatgaaggagatgaagttccatgcatgagcaggagaggggggcatggagttggaaggactgtgaaagacatgggcaggtgaaactcaactgaccagtggctggagctggagaagcaaaaagtgggagttctagatcagtctcaacaggtgctaaatgatctcaggcaatggtgggtgccacgtttgtggcgcaactgtgatttgggtggagcacgacacacttggcacatgtgtgggaaagatctggaagatccaacttgtccagattttcttgaattggtgggctaaggagtttggtcattttataagcaataggaagtcactcaatttaaatgattggctggggcaaccgcatcccagggataaaaattataatcgtaggaaggagaacttggcttgaattcacaccgagcttggaatgattagaagacatgtgttacttcactggaggtgaggcgaaagatgagagctaagggggtagacgtgagagcacatggcaaggatgagagcccaaagggaagaacagcagagagggaagaggaaggggcggaggagaccccgagcgtcctgcacagcaaggtgagagcaataaaaagccagagatgggaagagtgagaaactgggagatttggtaactgggatatgaagatgaggggtggttctctgggaagaaaaggaagccagttgtaccaaatgataccgatgggcgagggaaaagcagacgtcaacacaacatcccaggtcattggagagctgtagcgcagtttctgctgagtggaagaggcagtgccagcaaatgtccttcacaggtgtacatttcaaaactgccctcgagtccgtatcatgtggagatgccttattcactccgattattttataccgagtgggtgcaaccagccgctcagtgtaggagaggctgggggagagagggtgcagtgatggacagctggtgacttaatctgctgttggttcccacccagagggcaccaagagaggcacgatgggtaaacagtcttttggtctcaggctcctcctaaggctcggcttcagctgtaagctgctttctctgctctgggagcataaccttcaagagaatccttcagaaaggggagctagctagacaggcgtggcagttgcagcgtccacactgaacccttcccttcctaggcacccccttacttgttctggcatctaacacagtaccaggtacacagactgcactcattatatatttgtagaatggatgaatcaatctaagcccaagtaggctgagtgagctttgcagaatgtgggctccattgatgtgtttcctgaaacaagaggccaagagggtggggtgaggggggcgggctgcttcggttagtggttcctactctctgatcaccctcagtagcaggcacaggagctctgctgagtctctctcacttaccttgaccttggcagagcagcacaagtggtcctctaggtgaggaggcgaggtgggcagagatggggccaagatccagtctttccagtcaaaggctctaaatcgctgccgttgactttccaaatggcagttaacatctagtaggtcaacatatttgcttgtttattcaggctgaacagtgatctcatttgatgccaaaaaaaaaaaaaatggattaaagaagtgaggctacatctctgtgattccagacacggggcatgcaaatagaaatgcaggtggcatagtcgaccccatgtatcttgtatgtagtttccagccagagctctcatatggtgggttgtcctcccaggctacaatactggggcatcatggactgattgctttcactggttgcctccatttgaaaggactgtcttcttcttagtctctttctgtgcactccatgtcctatttctaggagagagcctttcaggaaacggtctccactgtttatcctttaaactctatgttcttagagttcttagaccatttctagtttatctttgagctccagaagtccaagagaaatgtccagcacatgaaaagggctttatgaatatgtgccaagtggtttatgaattcatgaatcagtaaacatccagccctctcaagtagcatgggcctttggatttctgatactgccccagtcttgcccttttcttttctctttctgctgggtattgaaccaagggctgtgtacatgctggataagcactctgccactgggccacatccccatccttgagtttgggagatagggctcactgtgtatcccagactgatctcaaagtgggaatctgattgcctcccttttcccgagtgctggaattacaggtatataacaccacacctagctttattccttttttgaccatatcttaggcacttatatgtttctactccccaatctacccccagccctcaaaccaaagccattcaatgactgtattctgtcctttctgaaacagaaagctacccattagtcacaaggtgcctgttgtgtgttatcccactttcagtgacatagacaagacatgggaaagacacttacacagcacttactgtgtgataggtgccactccaagagctatatacagatcaacgaacactctttcataacagtctattggtatggtgtattcttatttaatcccctgggagactcttaacttaacttcatgcctttcttctgcaatactaacctcatgtctgtgacctaactcttaagcaaggaagacattgtttgacatacatcaccttaacagcagccactgcaataaggaatctgaggcttattattatcaggagagctgactgctgtttcccagctctctgtcactggaaaagtcccttactttctgggcctcagataacaaatagaatatgtctcacatctctgcagcaaagaagcagtaagatgtccttagtgctgttattactgaagaggtgttgagttaccattaagtgataggttcaaaaattcctttgggcaagttccagctgtttgatcaactgataggtactggtattctgtggttccttaaacccaggtctgcgagatgctcgttccagggctggacattgttatataaggatgtgaaattccattttccgccagagtcaaggctgtgcggtgctgtgaatgccagcagcctcccgagatgtctgcatttccatcctgctcttctgctccgctgtgcatttgcacaaggtttcctgccaactttgtcttaggaacccactcccaagccctctctgcattatgttccttagagcactgttttgcataagagtctatttcttggaaaagctcaataaggagaaaatagaacaaaggggcctctgatagtttaagcacaagccacccgagtgtaattggcaaggcagagtgatcaggattggtgggaggggaacatgtcttcagccaaggcccagattttcagattcctcaatgagtggctaaaatcttatatgaagagggcccaaagcctgtgaggtctggaaagatctttgtgaatgaatggggtagattctcaactcaccactctgtatgccttggcatgtgctccacggcctgcctggtctggggatactgaaatggctttgcctcccttctcttacatacgaggctgaaaatactcctgtcagtcttcctcgatcttgtctgacagttgaattgttcacaggagtatcagggatacaggaaaaaggattctgaaatgtaataatctgtatatgttcaataatctgggaaagtttttcagtggcttcctctgctcctattgaattctgagtctgcagatcacagcttgcagggaaacatgcagaacatttggctgctacatcctgagcatccctcacccccgatctctctctctctctctctctctcctcctcacccctctgctcctccctcccgtgtgtgtgtgtgtgtgtgtgtgtgtgtgtgtgtgtgtgtgttggtaaccttgtgcccaataagggggtatgaacttcttgggagctgtgagaggaattgctggtagtgtgaaatggagggtgtagatctcgacaaagttccactgagagtggcatagagctggtgactgatttaggacttctgagctctcaaggttggttcctgaggtactgtattgctaagtacttgtactcagagtgctgtctcaggagtgaccagtagatggtgctctggcaacagggaaataagacttctggctccctgaggctgagaaaagggttttccaagggttttaaaactggtttccagagttctgatcagttgctgcttctccacacttccatttgtggtctttaagagaacagtaaaaccagggggaaacatacttaccagatttccatacaaggatcatgatggcaatgttctggccactcctgatagttccctttagtgtggttcctggaatatttaggcaccggtcagaattcatcttgagagtaggaggcagggcatccacaggcttagcatcattgtgtctccacttgatgatatacacgttgcaattatgtagcatggctattagaaactgaaaatcagatccattagatgtttacactctgccttttatcagatcggaaccaacacctcatgactccgaagctctgctgttctgtggtctgaatcagcaccttaattcacgctcctctgggctgtgagggctatagtagtgccctgctgtagggcttatgtacactggtagctataacaatcgctggtgcaatttaatctttaaaacggtatccacctgacaagttgcaaagtgaagagaaggaagccagtatagagacccagaggtcttaaagctctcaaagctgtgacattcaggttgaaggggaaaagagaagaacacgcctcagctttgctgcccttaaaccaagcccccttctaaacctactgatgccataatattttccctggccctctgggactgcttctccaagaatcctaatgaactctaccacagagccattcctgctcccgagtaaactctgcctagatgttggtaaagcctgctccgtgggaatgcaggaaggctaggctcagccccatgaggtcccagtgtggccagtgtattgtcttgcatattctaggcttctaaagaattcagcagtcacaggactcacagagtatggaagaaagaggaacccgaatcagtactagattttggcttactgggtaaagagacaaggcaggagtccttagtctttctcggaagtacttgtggaaggtaaaaggctagtgtgccctgtttagcaaacagacacagaggcatgatgaggaaggtgttatgtctcatccttgaagtgagctttagagcagagcttgctaggctatacaatctcgtggaagttatgaaagacacatcatttatgtcatcatccatatggctcattatttaatccccaatgtctaaaatagtgtctgttgtggggaatgtacgcaaatatatttgctaaatgaatggtttgtatggctcctctgctatggaagatcagattttttttagtcccgtgaagtttacagagctctgagatagccactctgtctaggtgaccatctagtgagacttcacagccaccttcctttactctgtctcctaataagctcctcggcaaagtgagatcacaataacaggtggcactggcacacttccagccgagatttgatctgaaatgatctccgatgaatcccagggtcaacactcgcttcctgagggcaggggtgattgcaaggcatccctgtgttgaggccatttctttgcatttcttgtacacagacccttttctgtcacacacacctacacactcaacattctcatacaacagacatgtatcagtgcacacacatagacactcacagacacatacaagtaggaatacacgtgcccaacacccagacaccactttatctcttaatcagttaatttcacacactgcctttcaggcctgccgcggtggcgctgccctcatggtgacttccaacactggggctttggtttgcctttgcttacgtcttcagccagccctcagcgcttccttcgcttccgtagaaaggttatggatacaactatgtgttgaagccaagggtgaacataagtcaaggaaagtatgttccagacagtgcagatgatgggaggggacagggatagactgtccacggagtctcctgtaggcaaggactagattgttaagcacagagcttctttctctggactacatgtcctccctctgcagctcagacactttttttttttaaatgacgtaggtttgagaagatcaatggaccttggttgaaagtaaaaggtggtggtgggtgggaaaccccctttgttaggattttgagggcactttgcttaggctctctgtctggggattggaatatctgggccacctgccaggaggaaagtggaacccaatctagaaggctgctttgtaaggtcccttagggtccataggacagaaggtcccagagaagcagaggtacttctctatgaggtctgttaagtgttggtttaggaagagggcactctctttgccctggggatccctgttgatggtagtggaacctaggagatccaaagcagaggctacaagatcctagggtggggtgcacaagtccctactctccactagagcagtggcgagcagaaccctatgcagagtatggaaagaggcacagccctgagtacccttcctaggaccaaagagagtgttcctggacaggtctttgatctgttgcagagagtctgcaggcatcaccagcttcagtgggcctctcttttccatctcctgagggaaccgcgactcttccttggacccttgcctaggtagccttcagtcaaacgaattcacaagccaaaccagcctcaccacgctggactctgagagccccgcccccgcgtctctctcggatccttggccaccttgctgcgctgctgcgctgtgctcctcaacctgcccttaagcatcgtctctgctctctgtagccaggaaggccgggaggagaaagagctggtctttggtgaggaagttcggtatgtggattaagtcctatgccctgccatcactagctaggctgactgcaacctgttcctcactgcgaccgcccgcccgctcgctcgctcgctctcccaccctcttcccggcgcagccgcggatcgctgttgcatgctgatcctgggaggcggcggcggcggcggcggcggcgagcgctctgggcggatgctggcacttgggcttcgctgctctctggttgctgctcaacttctaccccaaaagcaggagctgtgaagtcatttgcccctctctggctggttcgacttctcatcttcatttttcgggcgatgcggtttacgcaggaaccttagtaccgctctcccccccacctccatctccctctctccaacctttggatgcatctccgctggcagatttaaagagccaagtcttggctgtggaatttcttagatggacttgcaggggctggcgttctaaagcatgtcaccgtagctggccctcgtctttttttcttttcatttttttcaaagttcttttgttttcatttccttcttcctctctacccctcaccccgaccaataaatcagcaaactgttacctagcggaccagtgcctgcctttctctcagccaggtgtgccagaagaggagctatgtttgaggaccgaccttctccacccctctccggtccctgaacaccaccccacgctggcattttgggggaaaatattccctctagaagccctacccccttcttcttcttcttcttctttttttttcttgaggaatggagcttcgcagaggttgcctttagattcaacagttcagagcagggctgaagagcctgcaggggtccccagaggcggtggtccctgcgcctgtgtggataaggctctgagcctgcctgtgtcttttctgcctcttgttgtgtgcgggtgttcggcgatcacctttgtgtgtcttctgtctgtttaaacttcaggatggctcgcttcggggaggcggtggtcgttggcaggccaggctcaggcgatggagactcggaccagagcaggaaccgacaaggaacccccgtcccggcctcggggccggcggccgcctacaagcagtcaaaagcgcagagggcgcggactatggctttgtacaaccccataccagtccggcagaactgtttcacggtcaacagatccctgttcatcttcggagaagataacattgtcaggaaatacgccaagaagctcatcgattggccatatcctttcttacccaccatgacttccctctccccctttgcattccatcgggtgagggggggcacctagcatggaatctattccccaccccttcctggtgccaaaatttgcccctttgctcaagtgcaccctaccttgttgcattcacggggcaagcctgatgccccggagacctatttgggcagtagtggttttcaaggtaagacttttggttttggggattattttccatgtggaaatctctaagtgtacttaggtgcctggtgtggagacatctgcctctttctgggctttgtctgtttcttggccacccccaaagtcctaaccctttcagaagctgcactccatgtggtttggcttacctcaaatctcaaggattctttcataatcagttctctcttttccaccacttaagccagtccctctgctcccattcctaccagctgggaagacacttgcactgtctgccagcagagaagttgaggttctgggagggatttgccagatgagaagctccaaagagtagacccatgtatacaagaagacaaatgagtacttatgaaaaaggcgttgggctagggactcagctaactctggagaccaactttaagttctactgaaagtgaatgcctgtcaggggagatgatcatgtcaccaccagcccaaagagctcaaagttggagttctttcttcaggcaaggaggtgtgttcttcctttcttggtcctgggttgttactcttgcttcttaatgtttgccatacctggctgctctcccagtatactgaaccatagatctactgggcctgaacccatcagctgagggtcagaggtgtgcaaacaatttctctctaaagccaagggtgttgctctttacaaggagtgggtaggtcatctatggaggtgatggtttgggagtaaaaggctaggatggaagaaacatctttgcaggttttaccaagcgcactgaatgcaggctgctgatcaggcagcttcctgcctgctctgcactaagaatttgcatgcctgtcaaggccattaggagttgaggttggtagggtgtttcaggggattacaggaggcaagccaatgttttgaggctagatgtggggggtcctcttggggacagggactttggtgcctctggagacatggttcttgggaagaatacacctgcaaaagagactcctcctctttgccccatgctccctcccccaaccctcctctcaggtgtgcagcagtgagaaagctgaggctggggtgggggggggatggggttcaagtattagtttgcaaggcatcttgcttccccccagggcctgaacatcccctgcagcccccaacctctagtttttggccttctctcccccacccctccagttccctgcctcagctgctttgggattggctggtgcatggtgcttctaggcagcagcacctcattagaaacgaagcagcatctctaagcagtgatgcttcctgctgctgttcacatcctcccacagacaccccctggctgggtttctccctttctcctccttgttctccagttctcacctccccctcccacctccacagaatgatccgggccatagagtgcttgggttgaactatttagataggggcttggggcgggggaggggtccggtccctgcagtcatgcccagtcagtgagctgcacaaggcggactgattgcattgtgttgcatgctgcggcgggcggctgcaaataactccttggagcagtactctactggtctctcagggaaggtcccttccctcgaccaccttctacagttcttttagattccccacccaccaggttcccctttgctgtgacctgcttaggacaccccgcctccagacagcccccttctccgtttgcttgcagtagacaaagcagcttttcagtcccacagaaggcaaagtgtggtcacagccctccttggcacctcggacagcgccatcaaaactccctggctggtcctgagctcccaagtcaccgggtgcagcacacagggtacttccggttaagctcaagctcccggactgggacacgaagcacgtttccaacaccaaagccttttcctcttttcatttctgccgcaaagacacgggttttccaccaggagctttgagagcaaggtgctgctcgattttatgcattcttccctttagccaaaatgaagtaaggatcgccaaaggagagattccggagggaatggattctattctcatcctcagtgtcctgtcccagacatctttgctctccgcatacttagacattgtacagtgttcctacagcctgtaggctgttgtaacctgttcagagaacatctgctaagatgttgaggggaagctggttggattttttttccccttctggttgtacagtgtaactgactaatgtattccctccggtagtgaccacgtggaagcattgtgcctctgtgggctctgcattttcttccaaggcgcataggagctagctagtgtcaccttcccttcagttcccagcatccagtttccccaaatacctgcttcatctcattgagaatcagtgtgagcaggagttacctttaaagctctctaattaggctccttgggttcaaagctcagctcctccagaagccccagtgaccttgaaaagttacttcattactctaggattcaattttcttacctgtaaaatcaggatgataacaaagagttactgggagaattcaatgggttaatgtgccaagtgtttggaacattacctaattacccactaagcatccattattattaatggaatcctttgggggatttctgcacacctgcaaggtgggacctgacattcaaggtgaagtcatttagattcttgcatctcattgagagtgaggaacctcgtctgtatcacttgagagcttgttcaaaatccagactcctgggttccacttcacagttgctaaatcacacacaggtgattaatgtgtcaataactgactgtactcccggtggtagtagtgaccagtttaagaactactttgttctttgtgggggtcagattttcacaacaggaacattgttaggaagtgttgttaagaccggctctggtacgaacatgcagtcatccaggtgcagattttaattgctgtgcacgacactttttgaactttgttctctctctctctctctttctttttatttttttgtgacagaaagtcaccgaggaactaggatggtaaggtctttttcttacatgtcagggattttaattttattgatctgaaaggatgagctaagtaaaaggtgtgatttaatttgtgcttacctgctgacttaggagagccttatcttgctcttaataggggttggctagttttaatttgaaggcaaatgtctacaataaaacccagatttgacatgaaagatggcggaaaggcaacaaccccctctgaatgcatttcctttttcttagaagctacatctgcatagggagatcgttttatttcctcacgacattctcttctgcagatgataatgtagtctttttgaaaatgctaatctgatttaaaatgtggtatcccattttatggcatttctttcttgcttgcttgctcatctaatagatctaacaagtgttctttcttcctcgggcattggctattctggaagctacttgctgctctctgtactgcactctgccattctgcctgttcttttctcagggacagttatgtgggtaggcacttgggatctctgacatagtttgtgagatagcctactcttgtttgcactttttcaggtcaggggtgaagggacgaagtggcgtgtctgacttaagagattctacatcatagatgggagattgtttttcctccacctacttggccatctcagcaggcaagcacatgtttcatgtggaaggaacagttcagagtaggaagatcaaatgtgtttgtagcctttgagtggatgaagctcattatagtgaacccggggttgtgcatgtaggatttctcgtgaagaatttcagtatctcctctgcactctggatatgggtctgaggctatgtgtgcgtatcacagatttcccccttgtaaattgttcagtgaattgtaaatttatttggaggattttgctgaggattacaggaagtgttagttctcaaatctcccattttggcatattcttgacttctctggttgcctctaaatatacatgctttgcaagatagtaaactgcaggcctggtaagaaatttgggtttgatgtaactccagtagatcgtgagtcttgactggggacgctgggaatgaacaaggatggaatctgcaatcctgccggcagaggatgtggggtcctcatattttccattgactgtagatgccatgactggggttggcatgacctttgttttctggggttcctaggattgcctgtttgttttgtcctttgtatgaggtgagggaagcctggctatgacagtgagtgccatttgtaagtgggagacaacctggaaagtgagttggaatgaacaaattcacagcaacaaaacgactcgaggatgaaagcaaacatatcttgggtgtgatagtttggtctattggtttgtgtcctgttatccccccacccccacccactttcctgctgttgccttcctttcaataggtgcagcacacagtatgaactaaaggaggaagaaaaaatagtgagcacaggcctttcttcctcctcaaagatccagattggaatgagtgacttcttctaacgctgcttatctcttgagagccattactgtccgtgatgtaggtgccacatacctgtttctttcctccctccttaaagggacatctggtttccttcagactttgtactcttatttaaagcaaaagggagtcaaatttgctaagagatcagaactcatgcagaccccttcatcatacctgttggaccattggattgttgctcttcatagttccccactctgggcactcacaggacaccattacccaccacgagagtccagtcccgcagaggacatacacacaatttgtctatcactgaccacaaagacaggaaggagtagacctcaatgcaagataattaatcctcttttactcagggagccagaggataggccttcccttcctcttccagcccaggcttctacccatcatttcatccttctgtctgtctcttcttctcagttttaggctcagcctttttgagtaattcatcattatgtgtgggtttttcttggaattttcagaaaagcaaggtcatttgcctctgcttagatacgacaatggtcttttgaaaaggaccagtatcagacaccaactgtttcctttaactcctctattgtctatggtgagactgtgatatggggaaaggcagcttagaggacaaacttttaatctggaaagcaaagaatagctggactgtatgcccttaagagggaaagaaaacggcaacacacaacttaaaagtcttacctgagatatccccttagcggagaagtaaggacttcatgcctttgcttgccatttgtataatgactgccttctactcagccctgttgctttcaggtacctgacaaataggtagctgattacctttgacttagagatcagggctaagaagaaggcatttatgtccctaagttttggtcactcagactcctcatggtagcttggcattttcatgttgagcccctgatctaagatgcaggcttctgtaaacattttaaatcccaatgagaattcagataggaattggggtggagtgttgcagaggggtccactatggctgccgccaccattgtcattgtcactggcataccacatggcttttaaagcagtctctttaaaaaaaaaagttccagatatatgagagctacacatcatttcccttaccatgttctaagccgacacagagaggacttgtgtgggcttccctgtaatgtctctagcatttaatcaaggacagaaagcatggcataaagtttttaggctcatctgatctagtgttctcttgtgtgtgcagctcatttcaaggaaatgtctgagatgcgtcttcactcgagtattctaaatatgtttctttaatggccatctctggtctcgatccctcccgctcccccataaactcagatgaatcgcatatctctatatctctggaaagcaaagaatagctagaatatgtgcccttaagagggaaagacaagccacaccaaagaaaacagcagcacaaagtcttatctgagttatccccataatagagcagtgactgcttcatgggagttgttctccccctaaacccctcccatagtgttagagactgaacttagacttggaaatatagcgcttggttagatgcaagtctcaggttcctgggatctgtccctgttatgtagcttaagggagaggctcggtgcggcacctgtgccaggcatggtgttttcgttcatgagagtggatctccatctctgtcacagctgtgtcatctcaggagcttgactttatcgccaccattggccctgctttaatggtatctctgatgaatctggaaagtatgttttaggtttgtctgtcagcccttctgcccttcagggaggcgtactatcaggagatgtagcagaaaagtcggtaactggtgagttgtaaaagaagtgccctgggtagctccatgcatggagctttgctggggaaagactatatagtgtcattgtcaagacacatggagttgtgagtggcctcctggaccaggaagctctgggaactgggcggaggattcattagctgaaaggtttttgatagtgtaccactttcccctggtttcagatcattttctcacggggctggtcagagtcgaaaaagcatgaaatgaattttcaacagatactaacatcctggcaatttccagctgtgtgctgttgggaactagtttgccactgttctgtcagctgccatttctttcagtaggtgatttccatcagcatcagggttaatgcctcatttgggtcctttgtgttgaagtcagatgtgtgcactctaccggattcattaaggcctcagcttccaaacttcggcttgcctcagaattacctgcgtggctttattagaatacagctctgtgggtggatttgggctcttggagttcccgactcagtaagtctgaattggggtctcagaattcttatttatcacaagttcccaagtgttcttgccactggtggtcttggaaactacagagacgcagctcccttcatacagtttagctctgtgtgtttgacatatctttagagacagcttcatgagaattgctaatctgccaggcagtggtggctcctgcctttaatccctgcatgtgggagccagaggcaggttgatctctttgaatttgagaagggtctggtctacagaacaagtttcaagatagctagggatacacagagaaaccctgcctcagaaaaacaaaacaaagcaaaacagaccagctaggaagattatccagcctaaatctgcctctgctatactaacctaaatctctgctgttagcagaaacttatttttgggattcagacattttgaggcttccagatcattctaccaaagtaatgatgggatctttggaatgggaatacggactctcagttttaagacattgttaacttagagtgagttcattccttttggcctcatgacagagaacaggctcttataggaatgggctcatgcgttttaattccagcaccccgtacactgctggcacgtgacaagtgctgcatattcttttattgaatgatttgcaattaaatatgttgctattgacttaacaagcgtcaacaaagtgattaagctgtctctagtactgctctggctgggatctgcaggacgggggcactctggtggttgttagtatgagagtactgactgctgggagaaagtcaggggtcattacatgggaatcgggagttaggaaagacaagtatcgcgtcacagtgttctttagaattgccccaatttctatatgacccaccacaggcttccccgctgttaaagaaaatgcagtgtttattttctgaaaaattccagtgaaaactctattaattggcacccagagatctataatgtaatgacaattgaggtttctaatgatggcctctaggcacacagaatactggagtgccttctgaatattgtcaatccagtgtttattgagattatgttcaaacagtctgaataaactatgccccatattttgggctttcacaaactgtaaaccacatccacacataaagagttatctgttgcaactcattaattttgaaattatttatttttattttatgtacattcatgttttgcctacatgtatgtctgtatgaaggtgttggatcctctggaactggagttacagacagtgagcggccatgtgggttctgggaattgaacctagatcctctggaagagcgacagtgctcttaaccgctgagtcatctcttgagccccatgatttattaattttttttttttaattatcagcttgttaaattatcccaagttctcttctttctctggctctagtgggtgacagagagcttgtatttatggctctggaagtcagccctttcagctttagaatccacaggattggagctgagtcctggtgtaattgtgctttagcacgtcagcagggggtggctctaagcatttacaaaggatgggtagctcagtgggctttgcatttgcttggagagctcccagttggcaagctgatattataccccattgcacgattatctctatacaataacattgaacatggctgcctagaattttgaatagaactttgactaggcatctcatccagggctgtcaggtgattcctttttcaagcggactctgagtatctgccatttgtgcccggacccctttccatgttcttccacacgctcacctgccatcttctcaactcaggacaaaggatgatggactctaaagatcttattgtggggtgggaatattctttgttttcttaagggtaagctctacattttgtggaactttaaagtggggaatgacttgaatggctgtctcgatggcctctaggtgactgattggcatactggaactattaggtttcttagtacacggtttttaatgtgggggtggctcccattctcttgaaagaatacacatacaagtttgcactcagtatcggggttccacgagtcaatttaagaataatgattgtgttagaaaattcccacatgtctggatgctgggatactgggtgcttaagaagaatgttccctacctacataccacataccttacatctagtgtgataagaatcctttgtgaacggaccacagagaagtgtttgccagactgtcatgagacacacattctactcagagaacacaaattcattagagatcccttctccatctctagacaggcaaggacaaaatgctctctgttacttaaaacccttaagaacaagaaatcaaaatactctagagcctctgtgtgttttattagtccttttggtttctgctgtataaggaaatgctgatccagtccacatatttacttactatccttgtggttctggataccattatagacaagaactcctttcgatggcggttacgttttgatttgtattacccttaaattttatctgatctcggttaatttagatttaaatatctactcgtggctagtggcaggggcagataagccagaaagctgtttcctctgggggttgatgtttattaactttgtaattgagcttccttggcttcatgtgcagggtgtctcagggctcactgtaaccggcaccgtttccatcccagctcccgttctagccagcccagtgacagcaaaggccaccagcctttacactggctactctgtctgtctagctctaggactgtccttagaggtcattttctcgttgacaccatcgttgattgctcttgaggagaataagaccaaacccttcctctgggttcccactgagccaccttgtgtactatgtctaccccaacacttcttcccatataacgtttgcattggttgaaaatacaagcaagaggaagagccacttttccatgactgctttttaaattcccaggatatagaacaatataagcatatttgtttcagtgaatattcttttgaaatgagaagtagccttagatttctgacttgtggttgtagtcaacgaaacttctgatcttttcacattaggagatgacagaattgtgcctctagctttattcttagtttgatctttagtttgagattggggccctgatttgttttgggtttgttttatctccttgtttatttctgatgttgctatccatcctatggggatcttttcaagtggaaaggaaaactactatctatgtatggccaccaaaacccagcctttcttcatttaaacaaaccaacagccacaagacaagtatcattatcaacatcttaagcaggggaaagctgagggtaaagaaggttaagttatctcttcaagttcaaccccagcaagcttgaatccagggaatgggactccagcagcaactgctgctttggtcacacatccgtcatagtctctgcacaggacctccacccactctatgtcatctgcaggtttgataggcaagtgctcttagagttgagtcaaataattaataagaatatggttagaactggggactcccttactcttctcttcgatgtgttcgtaagtactccttgactgcttggcttttctcaaatcttttgaactgttctcaagccaaccgacgcttctttattttgtctgtaaaagtactgtgggagatctcactgtcatatgcttcactggaatcaatacatgctttcatgactatttcatgtctattttaagctaggatgcagcatcttgccttttccaaagtccactttaggtactgctttcagagtctcagatgatagtttattttttttttttactagatgataaaactcccaggagttgagaggctacgggcatcattgagtctactgcctacactgtagagtgtagggaccaccagtctcttgctcaaagctggagagtacatcaatgttaagggtgtggcttacagcttcaagtctcaattacacctttgctgcttcctagctgtacactttggcaacctgcttaactatggcaaattgtgttggttttttttttgtggcattcaggcaagacggcacataaaaaatacatagcttagtgatggacacaaagtaatccgtgaatgactcttagttgttaatatgtagttaattatggatgattcagtattaaatacctgcagccaagtttcccccttctaactgtattgtctcgctttctcctgacttttagcagatttctaactggagtttttccagatatacttcacgtgacctctgtgtaggcctcttcgcatacctgaaccttggggtctcacacctcagctatgaggaggcagaactcatatcccctgccaggctaacttgcaggactgtttgagggctagcgattagctcctactgaggatgaaagccctctgcaaacacatcagatattagtacaagtgctaccagtgatacagttcataaaagtgcaacatttattaagcacttactgtttgcttagtgctccccatggaaagcacctgttgaaaccattccttgtgagcacatgcagaggtgctctcttacatttgctgcttcccacagtcaggggaaaaggcttggagaggtttactcatttgtttactatgacacaccgagcaagagctggaagcctcattggacttagtgtttttagctgctgcagctgatagtggtacatgaaattttttcttcttgctttcttccaattattgagtttacattaaaaaaataaaatttaaagcatttacatcacaacgggtcctcatttgtatatttttcaaatgacgattttgcaccaatattttctcccaggactcattcagatttatgatgccaaaaatctcaaggggcaataatgggggagaatttttctgcaagtttccgatgaaagcaggtcaggtgttcaaaaccatcaacagccttcaccaaatgcactggattctgttttcacttatataaaattggtagccagagatttttgaatggcccagctggaggcatatggaagggtcactgggaatgacagttctaccttggccacctgacacattctcgggggttaccagccttctagtaaactctttcttgtcagttaggctccttggacttgcaagatttttgtgttctctcagcaaagagagttgggatgagtttctgtgaactgaggacgaagcttctgaaaagattggagagccgtgtggaggtcaggaaaccgagcctttggaagtgtgtcctatgagctctgtgtatcctggagggtattctactggtggaaactgacatgtgtgagcctgtaggattaaggatagaccacttagctcctggagaccagactgaagtctctgaagcagttatggagtgggtagaaaaaaaaaagttagaggaactgtctctctattctgctaactttggattgtatttgcatggaaatgagtgtttgtgaaataacggagccatatggatgcgctgaggtgcatgtgttcttctggtctgttgatagaggagcagttgaagggcgtgggcttatctggaggtggagtggatgggtggatgtggcaacacagggaggggggctggtctgcggaatatgggcctgtgcaagtgcagatgatctggacattttcacaagatggccctcccttatagagggtaatgtgtgcaagcatttacttttgaaattattacccctcttcaagttctgttgcacctctggacaatctgtctggtgacaattagagggtagaaaatgacaccattgaatgcacaagccacgggctcattttcatcacaaatgtcaatgggcaaactcaggtaacaaagcacggaaacagattctaggatgttataattatctagaagtttgcatactctgcctgaaaggagctttgttgagaataatattctcagtaaggtagaccatttctctttttttcttttagctttctttatttctattgtatgattttatcagcattctataaagactatctgccaggatgataagcgctcaggaacagagaaaaactaagctttaacaagtggttattgtttaatggtcactctataacgtgtttttgagactgacttggatttaactcattgttctttacagtcacctggggcaaggtcacagacagctgtggtcttaccagctgtgcttgctggtccctcactatcttggcagaagactgaaaagctagccttctctaatgaaatttcttcttggactagcactgtgaactgcttgtgtgtttttgtggtacccactgggtatgaggctaaacccatagatgagagaaggacgactaactgagtcagagaagagcaaagctctcttaggcactatgaaatgggcctgggacatcttggtttgtgtcactgggatgccagtttgggttgggatcttggatctttgactattcccattttttcctgatccctttggttaaatgaactacattgctttgcccaggagcgttggtttgctgatgccaattttcctttcaccattatgtgaaagtctgtggggttttcatgttttcagtgctccaaaaacctcccttagtcctctctgctccagggtacccgagtgggattgagttgtggaggtggtagcttttatgacctctccttgaacttttgctcattgaatgtctctgcttttggatttttttttttaaactgggacatgaaggctgcagaagagagttatcttgaaagaatgaaggaaaagtttgtagagttttgaggaaaacagtcttatgttcacactcaggccagttctctctattgctacaagtatccagtcaaccccactggtcatgggtttctgatcactgaatatatagaaaatttctatggacatctgacactttaaataggtcctgctatgccaggatttccaatatgaatgctaccaatagttttcttttttcatttgtagcttcacctaaagcaacttcttttattgtaataatggatggtcatttttatctcccctacttgctttcctaataacaacacagaataatagagcattagaattacaagattctaggagaaattctgattggacccttagttatctgtaggaaaacagaaagtcaaaggcctcaagggacttaccacaaggtaataactgactgtgtgttggctagaacatgctgtgaacctcaagactgtatactagaaagacctattgctagttgtggtgtgtctcaggctgagcacacacctttaatccaagagtgctgcagggtatttgatcacactgtgagagtgaatactggaagaaacctgtttctagttgtgatgtggctcagccctaacacatacctttaatcctggagtgttttgtttattgtaaacaagattaaatatagtcaattataagtcaagaggtggagcaagcaaacacccagttagttgacagggagtgaacatagagaaaaggcatagagagtgagaggagcccggaggacagagagagagatgcccagggaggagaaaggaggggcattcagtctggagggttttaaaggcagtatcaggaggggcaggagcttttaccatacttctatgaagtatgtctatgaagtatgacggtcaggtgtgcttcctctgtctctttgggctggtaggctttcacaccagcatttggctcccgagtcttcattgggtaaaactggaaggactgggattttgttttaaaaacaacacctgaccaacagcttttttgatccctttttctcttctttcctttgtgattcctctctgctcagtcctctccagctccttcatcgtccaaggcttccttctttttctgttagtgtgtgggtttggtgctttggggctatctggaagagtgtatataaggatcaagattaataaaaaaaaaaggatttaagtcacaaaaatgcaagtggataagaggaggctaattcatatagatgaggtcgtctggtgcaaatatagtgatgatgaactaaaggattcatgtcattggctaatgctctctttcccccaaaaatgatgttggagaaccatacatgagatgaagcagtaggacaggacccatcagggggcttccactaaacagaaaaccaacactaggttgcagcaggtaggagagtgggtggatgctcaggcaggcagtcctctcagaatagtttctggattttcagtggcctagggaaaggtaaattctccagaccccactttaaaagataataaatgctctttaaggatagttctatgaaagacataagcaaaaattctaagatgaagtccttccttccttccttccttccatccatctttccttcctttttactttatctcttcaagcaaggaagctagggtattgatatttgattattctgatgaaaacttcccaagactttggagggcatgaagatgacaatccagaggagttcttgttcttcttgttctttcagtctttgtatccatgccatagatgaacggtgtgctagatagttagaactctggtgttccctttggctggtccttgtttgcctttggaatctcagtttctgtaattgtcgatgggtctgtctggtttgaggacactactggcccctagtatcgaaatcacgagtttctccttgactgaacatgaggacaagtctgcaggtatctagaaatgctgatgcctctacaatagccaaggcataaagtatctggagatgggatacaacacttttaacttttgaaggtgtctctagtgatttggtagttcagttgagccagagatccacttttctagagagatgggtcttctatctaatccatttacccatcttcctccctctcccttcttcatttatctacccccttcctctctcctaccttattttgtgagatatgtgttttctctgtattccaggctgacctagaactcaagatactcttgcctgagcctcaagggcatggtgggtttcagtgtgtactaccatacccagctgtttctgtttcttatatatgcattttgatcatgggtggattcttctcacttcccttgcaggctgttatgaaagagctggagtccctgggcactctggaattcatcctaagataataaactaattaattctaaggggcattgggttggcaaaaccattcacctacagcttcttcaggcagacttttgtctgatccaagacttcctgatgacaggtctagaaatcttagtctgaggagcagaaccctcaggccttcagttcacccagcaggcccttgagtacccaactgaagacttcttaaccttgattcctcttggttagtaactactaagcctctgaaggttgacttagcataatgcccatcaaatggaggaacccctgaacattcttaacaatcttctaggaacatgggacttacagtaaaccatatgctgagactggcctctccatactcttgagtgtcttttgtgtatgtttcacaatccctgatgtaaattggtagctcaaaactggtcagaaggatgatattgacagtctagcatttgcaagtgctatacatgagggctttctccctgatggtatttattagcattgcatttgatttacctctcaaaaataatctgttttcttatagacagtagcagatctaaattctgtatattctgtattttctcagatctgcccttgggagagagggtatcgtagtctttagaataactttaaaagagatatcagatttatctatttcaaggtggcctttggttgttcgaaagcaactatgttatctctcaagtctttcctttgcaagctgagtattagttgcttcaacacattctcatctggtttctacgctgagtggtgtctttgaacatgggtacagttgcagagttttcaaaacaaaaattctcggagcaaccatctctttaacaaaaactacttcattttcttgcctgatatgttctcagcagcatttgatgcctgctttgtgatgtgtgagtctatgaagtagggaacagcgtggggtgtggctgttcattgtagctcatgtttttcccccttaaagtacaagtcgctgccagaactcttgatggacccaaatttgtcagagtgacatcaaaacactaattctggtttctgaaacaagtaatttccccaatgctgttttgttttttatctgaggcttttagcgtgtacctcttcattcagtcatttgtctcttgatcaccaaaaccacatgtggaatgacaactgtttttagtccaagatccattcagacacataacaaatgaatttcttaggactccttcaggtgatagccactggaatgggcatgagtagcagaacaaggagggcagggcagtcttctttttcagaagtattcttatcactccctggcagttatgtgatacaaatgggtcttgaactgtctgccacttatcatctgtccctctgtctctccaaagtagcaacaatgtgaccttcctttccatgtatttgtgtaggaaacagggtcttggaagtcagacagagttctttgatctagaagccacaagaggtgagacatagtttcacagttgacaagagagtaacactaaggatagtttgagtaactgagttcactgacctgcctagtagtgcatcttgactgacctcgggggcagaaggcctcctgagggcccctcggcctccgtgctgagttctcaccgatgccttccttgccatccattcactaggtttgaggttattaggagcaggggtgatggcattttcattttttgacaggggtagggtgggttgaaagagaggtacatgaatgttcagggttgccagtcagatagggattggaaaagaagcagttgtcatggtgatggtgggttgcatcccaccaccatggaaaccaaacttaaaaaactgatgttaaggctggaagtcacatgatatatcattttgttttgttttgctttgtttctaaaaggaagaggggtttgatttctatccctctctcccaccctctctctcttaagacgagacagggaggtgagaaaaactgctcagaggataacaacgagattgtgaagcaggacagcatggagtacttaggaacttctgtctcatgttcttcttcttctagaacagttttcctgctgttgggaagggatgaggaatgtgcttggagtttcacatttgccatcagagctgtgcactggtaacgcacatagagaagcacagggtgttagttctcctgccccgagagggcccagcctgaactcatctgctcaggacacagaacccaaaagcacgcggcttgaagaaatggggaaatggagctgagcgcacgacttcttccagatgtgaggacggtctgtatgttgattctttatagtatctgatgacatttgcagcttttgtgttgctggaagttagtgccctgctgcgtcaaaccagtctaaaaggtttttatctgatagtcacaaggactgctaataacccaggatggattatacttaggaggcacttgcgacattctagcctctccacagccatcagagttctaattgcttgattagccttgcaaaaggctcagagtaaggcacagtttctttccaggaaactttggttctcacttcctttgagctgttccatcttgctagtctgtccagaggaataagcactcagaggtgttagaaagccatgttgaagttctatccttttatctcccacgtgccccttgtgcccccactcccacagtgatcaggagaggaagtggtaagatttcccccaccccctcccatgaagtcattgggtatagggcttctctaacaggtgtgaatttccctttcagactgaagggcatgtgtagacaggttaggcagtagagagtcctggagggacattgtttgggaaagggtagggatgaaaacacagtctgttgacacaatggccacaatgatggctgtgccagttgtttcggcacaggtccagcctctttgctattattcatcgctgccagacagatgtgtttttctctgtggcctcaggcagagtggatgccatctcacttgcatgagctcactgtgtctccatcagggtctgctggagctggagccggagcgggacctctgtggtggttcaacccctcctgttcttagctctggccctgggtgtgattaatgtcccttctaatcactggaagagattgcatcagagccatcagcttcataaatcctcctctggggactgctgtttggaagagctctccatattcccaggaggtcctgggccaaatgtctttgctttcttcccggaggcccattaccataattttcttttaaaatctttactggggtagatgtctttggtgttagatcatagctgcagccagccagccccctcctggagactgtgaccacagacagatgctctccccaaagtctcaagcagtagcagacacttaagaattgatttagtagggtaataaaagtgacctgcgatctgtttagggccttgtgttcacctgttgttttgggtgctggtccttttgtctttctagtttcttctatggaagtggatggtggtggccttccctttgagcaccgtactggggcaacttttgcaatgaaagccctgactcctgtttctcatttccaagtttcattctctcctccgctgtctatgtccaacacaagatcctgatgttttttccagtcatatagcccttgaagggctgtgtcttactatttattacttgacagtgtctctttggaacagagcttctgacagagtcacacaatagacagactctttcccagctactgcccttgagttaataatcacatattacatttatgtgcagctgaggagtggtaacatatgcaatggcatcaaagtcgttgtctgactacatctcttcaaatcgcatatccctaaacaagaagtctgaagcgggaagaggattcagaccttcttgcaggcagttagttgtcctgggtctgaggctagagatagatagggatggctaatggaggttgagatctatctcctgggagccagtgagcacttggtgagagtctcccgagttctgacaactgccagagtggtcacattcttgttcctacataagtgtcttctccattaggcctggaactcaaagagaacatcgtgttctgtcaacctgcctgtccctggtggccctcagatcatattcatttgctttatgcacggtgataaaggctctgggaagggacagctgagagcagaggggtctcagaacaccccacagatagggctgtatatttctgtaagaccccccccccccacttccatttgcttcctgcagcctaagtcttccccaggcctgtgcctgcagttgtgaaggcgagaggctggctcagatgagagcagttctgcttacaaggcaatgcaaggcgcgcaaccctatcctagggctctgttggcaatcagagccagcaccatagcagcattaggtccaccctctgtcttgccccagctttctctgctaaagaaggaactaaacaaatggcaggtgtgcgggccgagccatgctgctcaaattagctgtgttgctaaggaaacgagtcaactggttgaaggaaggagcattgggtaaaagggataaatcaataagcgaacctatttttatcatttccctaatgattgtcttgaagcagttagacagggaaggggaagggagagccgcagacactctagtcctcattaacggcttggagggagtgagcagtgaaggggtgtttgggaaggttgccaggaaagtttatgaagtgaggcccctagtgagcagacagtgagagagaggggaagctagctcctttgcaggcctgaagctcttttttggtcatgttcttctttgactcggtctaggcctttgttcggcagcatttgatcttccctggatcttgcacaggcttccataaccgtcttctttatattcaggattgtggtggattttggcattggtttgattttctttctccctcgaatacatatagctttaattgattttatgattataagttaatacgtgctcattataacagtcaggcaatggataaaggagtaaagagaaaaatgaaaataaccctattactcagagaaaactcattatccttctagcaaagccgggccccacccccttccctctctcttaacattaaagagaatgtctgtgcatactggctttttttcgtttttgatagataatgtatgcccacagtatgcagtacaaaagttcagatggggatactgtgtagagagaatgtaggatgtctttttataatgataacccagactctggtgtgcctgtgccatctatgtattgattagtcccttattcattaaataccaatcattagatacacactattcccaagcaaagggttggccaccaggagcaggcaaagcctctgccctcagtttcccaggcctttatgtttcattggtcccttcagacaaccacagacccaatggattcacaagaggcagaggcttatgtagcttaaatgaaaaagagctctttcccagttcttcccaggtaggtcctgggtccatggaggtgctgagtgggtttctgagcttgcagcatgcgtgcgtgtgtgtgtgtgtgtgtgtgtgtgtgtgtgtgtgtgtgcacgtgctacatggaagagtcaataaatgtgtcactcaactcagagataccagcccctcctcaacttgtgatggccaataaaacctggtttttgtttgtttgtgtttgttgttgttttaattagggctcttaaccacagtcccatgagggccaatcccaagagagatgctctgaacaaaggactgcctggtgaagcaagtctggagtgtgctgtgtactgcttcccaccccattgtgtgtgcagtcacacactgtgtacagtagcattaaaggctccaagcagacctgctgggaaggcacctacttaactttacttaacccaggcttccctcatttatttgattgcaactttctgtagcactagtattttgtgacctacattgtagaggcagcaccccagatgccctcagcatctgcagccattcatcaacgctgctttggcacactgtcagtttcctttctagaccaagttcccaggcaaggtcagaaattcctcagccaccacttttgcctgattctctctgtcaacagattcatcttggaatcccaggcatcggcaccaagcccagcagagtttagcctgctccagagtcttgtggaatgctgggccctgggttagccttttgccactttatgtgaaaagctctagattagagccagctatatgagagaggcatactccttctgatccttgtgttctggtggccttgtcagggtgtgagttgggtggggacttgtcctaagacaggggatgtgcgtgccagtgtagatcccagaggttgcccttagcttccagagtttgaagcagaaagcataagagtccttatgggctcccatgcagtggcttcccttccgctgtgaggacttcaggaagcataatagaatctggggcagaagtccatttggaagtccaatgaggctcatccattttctagatcaggtggctgagcatgaggaagcagagaatttctgggttggggatgctgtgtgtgaactggagatgtgtgggaaggaaggactgccagctgtgggagaatgcctgtgactcagggatccgtggaaatggtggtggtggggatgagatggtactaccaaatgctgtggactagaaaagtcacctcctcctgtgctggcccaagaccagagcaactggagggctactgatgtctctgtgcacacttggccactgcttgccactctccagagatccctagatactcatttgatgccattaacacagggttacagtggaaatgggaagaggggctttggggtacgttggggtgattgctgttctgtacaaaagaggtctttaggccctgtgtcctacactggcaaccccgctctgctctatgggggtgacaggagaatggtctctgtccttccctctttgtgaaatacactacctttctcccctgaccctgagttgtggaatttgccagagaataggttgaactgcaagactagtgacacatctggctcgtgtttgtcataacagtaattacagaatgaaatcccagtctgcaggatgactgggccctgggagggagttggtgtttctcttttctagccatggccccacctccccttgagcttgcagcaaagccttgcttcaggagtcagggagcctgctttgaatcataatttttttgtttttgtttttcttcaaaaaggtagagaattcctcactggtctttataaaaacagccggggaaagcttatatatttactcactggattcacagtttggtttctagagcctggactttgccatgggagattccaacccatgctatgcttttctgttacctataaatgcaggatcttaggagagaataagaagggaccattctttcttttggtttcaggatgtgtgttctgtgtcagatattacagcagaagggagctcacatggggtaggggaatggtttcctttccagggattctggattcttctttccctcagttgatcagaggttctggagagaagggtaacactagatgcaattctgaaagggtagcagatagccacagcttggtctttattgaggccaaagctggttcttctgcccaggcacctgaagcatgggaagaacaggattcttgcttttttcttcttcatcaatttgaagccctgtttcattcctggatttatgttttatttcactcagtgattggattatctgacatatacctaactctaatatttcctgcctccctccttttcttaaagaaaacgcttcattttcacggagcagtcctaaatgataatgcctcttatgcaaagggtcatatgctatcctgcctgcctgcttgctagtgcaaatcattcatactgcaaggatcagcagaaggagtttgtatatgtatgttcacagccatattagaggctggatccccccttacatgaacttggtccttaacacctctgtttcacgccatttgagtacatgatcctggccaccatcattgccaactgcatcgtcttggccctggagcagcatcttcctgaggatgacaagaccccaatgtctcgaagactggtatgtgtctgctttctctgccctttctcctctgggttcctttgactccctccccccacttcctctctcatacagctctgtgaaatctctactctttgctgagggacaagttagcaataaaccctgctgggactcaggaggaagagggcattgcaaatatggggtatatgcatcacatgacagtcaggcaagaagaaagggcaggcatgtgggacatttgcttcactcctctttcccaagggactgttggagtgagaaggaacatggagggaggatggtgaaagccgagtgtgttggtgcttatgaacttgctaaatgccgactgacatccttattctcctaaaggaatgagtcacatgtctaatgtattcctctagaagagaggacacaaattattttaaatctagacacatgggcgagtggccacacaaatgatccaagcatgagaactatgaagtttctagctagagtatagacccaagaatggagaaataaactccttctgggcaatgctatgccatcagggacttccaggagaaaaattctaatctccaggtgggacacatctgtccatttctacaacccttttccatactctgtgtattccatgcagtttcaggtcctcttggtgcttcagtaacctaagctgtacccatataaaaggctagtcatcatgggtgtacaggagagggtcaaggtgtgccttggcctgtgtctgacaaagaataattattctattgttgctctgttcttcatccttgcaggagaagacagaaccatatttcattgggatcttctgctttgaagctgggatcaaaattgtggctctagggttcatcttccataagggttcatacctccgtaatggctggaatgtcatggacttcatcgtggtccttagtgggtgagtcttgcttcttgcttccttccttcttgctgtgtgtgtgtgtgtgtgtgtgtgtgtgtgtgtgtgtgtgtgtgtgtgtatgtgtatgtgtgtgtgtgtgtgtgtgtgtgtgtgtgtgtgtgtgtgtgtgtgtgtgtgttgggaggctcatggtgacatgaggtagctggtacaaggaacacacagaggacagagatcagaatgtacagtagaaaccaaagaaaaagatcaaggctgagagtctccatagagctagaccataaagaaaccattcttggaagagttgggtgtatgttgcattagatagagtcatggactctcaggggtgcctggtgtcccattgtatacttgcttgattgctcaacacctagttttccaggaaggagccttttaactgaagcaatcagcttgtgctggtctagggaaggggtcatcccaagagatcagtcaaaagatgcttgggtgtactttctttgggagtttggagaagattccaactatgtttttctgaactaaaagttaagagaacagaattaatgatttgtagatttattaatggcataaaattgaatcacatgaaaatatttgataagacattccttagaacttattatagtatatattggaactgccctgatgttataggcacatataggatggcgattcatttaggtgaatatttgcaacatcattcctttggatatgatgatgagtggatgtatgaggatgatgagtagatccatcatctgttggcagcagatgtgatgggctttggcactgggagtgataagaatactgtccaggatttctatggcttgtgagtctttgaatccattgtctttcagggcttgctggggagaatagtaaacttgcataggtgaggattaagtgcttggcatagatatttccatccttaggtgcccaactctctggtgaggacaagcaaagacatgggacactgaagagagggattatgtagccaccactgtgactgacaaaacacgaggaaaaagaaaatgtgtagggagtttcaagactgagaagctgagcttggaaacatgaatctacccactgtcttctaacacagacacagtgctcacatttttagcttttaggccaattgtaattgagtgaaagagacgtagttaaaggtatagttgattagaatacagcttacaagcagccagcctcagtatgggtagtggataaacagggctgaatgttcatgtttagaaagtatccagtgccttacaaaaggattttctgtagaccattttccaaaaaaaaaaaaaaaggttctaatgcaacattttaaatattacttagtatataaagtatcacagaagtatattttcacagaaaatgtagcaactggaataatgttttaaatgtctctaaaatcagtaaaatatactgtattggaaaagtcctaagtgagaactgagtcatgttattttattccatttgaaatcatattagtgtttgttctgttttttcataatacttttactgattatttgtgaatttcacatcgtgtgccctgatcacacttacttctcagtcctcctctgtctagatccctacccttatggcctcccctaaccccacccccaaaagaagagaagaataaaacaacaacaacaaaaacaacaacaaaacaagtccaatttgtgttgctcaaatgcttgctggagcatggtcagactcccagtggccagtcctttaaagaaaacagggtccttccccacctgtacccccaccaaaagtcttcagttcttcaaagtggagagctgcacttcagcattttttatcacatttttaaagagttctctttgatggctttccgtctaggctgttacttttggaggggctagggtttgtcacagaagccttctatgtccctctttctcaattgttcatcttcagtcaccgaaaccactgcaaaaaagtagtttccttgccctttatagtcagcaggagtgtggatcatggacttttcacatggtttctaagggtagcatgttggggtgtgtgtgtgtgtgtgtgtgtgtgtgtgtgtgtatgtcattggtcctgctcaatgttatatgcactgaaaacatttgaagtttctgttctaagccactcattttattttaaactgtcatatattgatttttaaaaatacagaaaaaaaaccagaagagaaaaatccttgctgactgattaaaagcaatttctgactttaagagcaatttctggcttttatggcatctctttccatccctttaaagcgaagggagctttcttttggatgtctgtaattttgctgcctttctcaatatatgatgagcatatcacacatcattctgtactctactgaaattttgtggtgactgatgaacactttattaagtggatacacacagcttgttgcttgtttctgcttgttattcgacacttagattgctttcttgtttttgctatgataaataattattaaagatgctctaacatacatcttttagatgccacactttactagacagtttgacaggctgaagtgcagtcagttctctgtatctttggcttctgagcagacccagtcaagcgtggataggaaatatttggggaaaaatatatctgtagtgagcctgaaaagacttctcattcttatctctaggccctaagcagtatagaataactaatatttacatagtgtttgtcctgcatagtcttgtaggtaatgtagagatgattcaaagcatccagaagggaggatgtgcatacaatttatgctagtaacatgacatgttatataacatatgtgagcatgtgtaaccttcggcatccacagtctcagacccagtctccttcaggtattataagacagttgtactttgcagggggaatctggtggttctggtgtgggaagtggggactctgatgtgtatggggaggtggaagaccctttccatctgaccagacaagggaagatcaatgtgaactttgataagggctgtcaacaccattgaaggagcagatttacgggaaccagccaggcccttttgctgctgtagctaagaagatgcctattcctcacctacatttccagggagttctagcacttggccaagtcaactgttctgtgtgtgctgtctcaccagttttcttggtggtttctcagacacggatggctctctgggtaactttgactatgggtacttcctagttgaacaaacaagactttaagtcttgatcccatctcacctccagctcaacatgcaggagctcttctcagctcacacatagatgttttccaggtaacagttcactgtgctcttgattgttgagggctgaggttccgacccactgtaatggaatgggtaattgaactgtctgtatttgtacactcacctaccaccttgcttttctgctaagaggcataccatctttggagtctgcccatgtctcagaatacgagcatggcagtattgatggtgttctctttttctcagtggtgcattaaactagggacatttttacaattatggcatctcaacttcagttcacatgttgcagtaccaactagtgaggtgggcagaacagactgcagagatgggttattcagtacccaggatgttatatcattttcttactgtctcttgctttctggtggaagattctggggtttagagaatgctctctgatgcagggcttctatttttaaagcccactccatgtatcccctctcctggccacacaatcttcctttttttttctccttcttgacacctgcatccagagttattcctgctgacagcacttccttcccaccttgtcttcaggtgtcacctcacattctcctcctgtgcacagggggattgacagtgttggagcatgacacgatacttcagggttgaggctgcataacatcttagttctcggttctggtggtgggtggggggcgggagggtcgggggcaggagggtgggtgctgtagaatcatacagctggctcagcacgagacctgtcatcattagcctgctgctaagaaacaagtatttttggggggggggactggaatccctacattctgcctgccacccctaaccttccgtagtatttttagtatccttagacatgtaagttgaagatgtgtatggtttaagtcagtcatttaatatattcacctataaacccataaaagggctgtccgagtccattttctactgctacagaatatcagacactgcgtgtttttaatttttttttaaacagaaaagatttatatcttacaattctggtatctgaaaagtcttaagagatgattctgccatctgatgaagcccttcttgctgtgtcctcacagagccaatgacatcataagctgaagaagagaaagaaactaaccaagctcacccttttagtaggagtctgctcctgtcataagtaaccaattctggtgatggcatatagtctatgccatagggagttgtctgcatgaccaaatcaccttagaaaggcaccagtcttgctacatcacagaaccgcttaaatttcaactggggcattttcagggagactttggattacagtaaggatcttgtcctcattttccagacaacaaaattgaggctcatagagggcatgtgtctaaacagcagacactatctaggacagtggttctcaacctgtgggttgtgaccccttgagggtggtcaatgaccctgtcacagggctagctaagaccatcagaaaacatatatttatatcacaattcataacagtaatagaattacagttatggagtagcaattaaataattctatggctggggcggggtcaccacaatgtgatgaattgtattaaagggttgcagcattaggaaagctgagaaccactgatctaagaacttaagcccatgtcttcagcctctaagcccgttctgcaacattcttccttccttagtcacctctgctaactcaaggctctgtattcatagatctccataattcatattcctttggccccctagaaacagtggatggagcatggcagggctgcagatcatcatacaagtgtttccaactcaaagcgggagctgcaactggagtttgaagagggcaagctctcctgtggctttctgaggcttcagtctgtgagcttgcaatacagcgccttgctctatggcaaaggaagtcagctcttgatgtaataatgctgtttggtgcctgacaagtagatcaaaagatccagctgacttctttgtgaattggcttgtttagacactcattcattcatccatttgcttattcaacaagacaaatcttgttgaccgagaaataccaaatcagtttaattctcatctctgctgaaacaaacttttgtctgctacgacgtgggatcgctcttgaattggtaataattctggagctttatgtttaaactcttgttaggccacctggaatattctatattacttaaaatactattatatattaatcttaacaggaagttattacctaaacatatagagaatgataggagatgataaaaacttaggcatctctaaaccattttaagagcaaggaactgggagacatctgggctttatgacttttgttcatctctgtatgcccagagtctggtatatagttactgcttgcaaattttgacatattacttgttccactaccaaagtcttacaccttctacaggatgcaagaagagtggtgagcgaggcctaggcctggagcagtgagagactgtccttacaccttccctttggtctcactgggatttgtgtctacaactccatctgcctagcttattttgttagggaaatgaagctgagggtttgtactccaggctaataagaaatactgggcactctgttctatctccttgggaagtgatcaaagcctctagaggaagctgggttgaatgcagggagaagccagcactcatttgtcctataacactggcatgtagctaaacctgggctaaagcccacattctaaaggtgatacttctaatacggaaaagtagcaccttagataagaagtattaggtttaattattttccccatgctatttcagggatgaataatctaaggcacagaaaattttaataatgtgcttctatccaagtgaatgctctcctatacacacattttaacatcctactatttcaattacctgtggtcaaccacagcctggtggacacttcctaagtattgaatgacattcccttctgagtagcatggtaagatctctgaccattccttactatcctgtcagagacatgaaccatctcattgtccagggtgtccacaatgcatgtatatacctgcccctctgatgtcaggttttcctttcaaggtattgcaaaacctgtgctccagtgttccttactttatttcataatggccccagttgtgaatgttgtcatgttggcaatttttctacagtgtgtttttgtaacttgtattataattgttagttagtcctattaatctcttactgtgtctaaactataaagtaaatgttatcataggcaagtaggtatggaatgtagaaaaagtcatgatgtgcagaattgtatactagctgtagttcttcatgctttctggaggtcctggaccagacctcctgtaggtaaagaaggtagttctatatgataagcagagtttgaactcagtctgtctgcctttagtgtctgggtttcttttctgggccattgtatcttctgaacttagagatgctattagcatcttagggatgctcttcagccactgaagacattcaagcttctctatttcctctgcacatcttttggttcaggcccagtggtgagctgtacgttgttcctattacacttgaggaatctttattttcagtcctgatgatattacagagctagtctcaagtatgatcccatttgtactggctagttttgtgtcaacttgacacagctggagttatcacagaaaaaggagcttcagttgaggaaatgcctccatgagatccaactgtaaggcattttctcaattagtgatcaagggagaaaggccccttgtgggttgtgccatctctgggctggtagtcttggttctataagagagcaggctgagcaagccaggggaaggaagccagtaaggaacatccctccatggcctctgcaccagctcctgcttcctgacctgcttgagttccagtcctgacttcctttggtgatgaacagcagtgtggaagtgtaagctgtataaaccctttcctccccaacttgcttcttggtcatgatgtttgtgcaggaatagaaaccctcactaagacaccattaaaaacatcagctaggtcagcacacactttggtgtcatgatgatcaactggacagtggagctatgacctgtttgagtggatgtgtagtacaagtactgtagtattcatggctgtctctaaacctttagcctctgctaaggtttttgccaccagactcagacaggcacttaagagctattgaaaagactttggcgccttgctaggtgtgggtaggataggtcacatgtttctcaccaggacaatgagtctacatgtcatgaacactcagaagaagggcttcagacttgtctcttgggggagcttatttaaagagatagcacttaaatagcactgagctgcacaaaggggtagacatacaaatgcttgggggtgaggaattgaggagagagacagagggcattcctaagaacccagtagtgagagacagttctgtagaggtcaacaggagccaacctaatccatgcaagagcatttatatcaagcagcggagccctgaagacttgaagctgggggggtggaatcctacttctaactctgttctggacactgcacatgttttttttttttaattaaccaatctgatttatgtatcaataatatcacaatttacaagatgccaatacaatcatttcagagccaattgataatgataaaagctttatcccaatatttctaatcttatgaagtcatgactacttggggctggaaaacaccactctggtacaggtcagcagccatcttgcttcccctttttttttttccattttttnnnnnnnnnnnnnnnnnnnnaatggcctttctctacacaaagaataaacaggctgagaaagaaattagggaaacaacacccttctcaatagtcacaaataatataaaatatctcggcgtgactctaactaaggaagtaaaagatctgtatgataaaaacttcaagtctctgaagaaagaaattaaagacgatctcagaagatggaaagatctcccatgctcatggattggcaggatcaacattgtaaaaatggctatcttgccaaaagcaatctacagattcaatgcaatccccatcaaaattccaactcaattcttcaacgaattagaaggagcaatttgcaaattcatctggaataacaaaaaacctaggatagcaaaaactcttctcaaggataaaataacctctggtggaatcaccatgcctgacctaaagctttactacagggcaattgtgataaaaactgcatggtactggtatagagaaagacaagtagaccaatggaatagaattgaagacccagaaatgaacccacacacctatggtcacttgatcttcgacaagggagccaaaaccatccagtggaagaaagacagcattttcaacaattggtgctggcacaactggttgttatcatgtagaagaatgcgaatcgatccatacttatctccttgtactaaggtcaaatctaagtggatcaaggaacttcacataaaaccagagacactgaaacttatagaggagaaagtggggaaaagccttgaagatatgggtacaggggaataattcctgaacagaacagcaatggcttgctctgtaagatcgagaattgacaaatgggacctaatgaaactccaaagtttctgcaaggcaaaagacaccgtcaataagacaaaaagaccaccaacagattgggaaaggatctttacctatcctaaatcagataggggactaatatccaacatatgcacatgttttttaagaattctttttaccctgggatcacctctgaggaaagacatggcaaagagaagtgaatgctttctgtgtcttcagctccagcttgcagggaatgagtatataacctatnnnnnnnnnnnnnnnnnnnnnnnnnnnnnnnnnnnnnnnnnnnnnnnnnnnnnnnnnnnnnnnnnnnnnnnnnnnnnnnnnnnnnnnnnnnnnnnnnnnnnnnnnnnnnnnnnnnnnnnnnnnnnnnnnnnnnnnnnnnnnnagagagagagagagagagagagagagagagagagaagacaaaggaaatcgtgggcaggggaatgcggcagaggagcggggaccagccatcctgcagcctcagctaccagccagaggcatacacagagtggtttagcccaaagcctgtttgtaggaggatgatatctggagctaaatatacatcgataggtatttttagagggtttctgtaagaaggctgccctaacatgtgtttccctagcagctaaagatcgaggaaagcaccgttttcctctgggagccctgtctttctggtgctgaaaatgtgggggaggtgttgcttatgcagccccaggggcccccagcccgattcaaatccccgcagtaatagcgtgatagccctgggtatttatatagcaaatcatgtcagggagcctcctgggatcttagcgactcgtcttttacgcacccttttagttgtgggtgggccaaagccagaagtgggagaaagaaaggctgggtagagggaggaggcagggagcttataattttgtagatgggaatctgacactgagagaggagacatgaggggttttgcgtttcccagcttcggtgaaacaggagcttaggaacctggtgtccttagtactgctggtggggaggtctgtgagttcttggcctccactgcttttgaaattcttccctggagcagagctgggagctgcttctatggcaggtctcctcctcttccctggcactatgttcagtgctccacactgggggaacactacagttactggcccatgcagcagctacttttatcagaacagtattttgttccagttgtatgatgggagagatatggttcagatgcagatttttgcttgttattctttatttttagaatgaagaggttcattcaggggaagaggtaggctacatattaaacttaaaggtcttttctgaattctgtacattcagggaggctccaaatgagaatgccagttagaacttaacagactatacataggttcagtaggcaaatttttctcatgcataactgtctttttttttttttctgatgagatacatcactagtccactgaacagatatttactgagcaccatctgtattccatgtgcaaagttttggtgttaaatttcttttctcaaaaggctttttcttgtccccattggtggaagtgtagtcaagaatttagcttatggtgtcagccaagaagaggctaaagcagaggaggtaggggacgcttggtgatactgaggacatttggtctggggcttttcttcttggatttatgttgatgaagggtgatttggagacagaaacagtgtccaatgcattctctgaagaccactcccagccctgtgccattcacttcctgggcatgaatatgtgagtgatggagtgaggggcagtgaaagtagagatgtgctggcatagtagagggtataaggtatgacctcattctatagactccgaatacagagtaaacattagagggggtgttcgtgtttccactctgtggataaaatacgtctcctcccttaagtagacattgtaactcctgtctgtgttgtaaatatagtccacagttaagtataaatgcatcagcgtgaaatgttaggacacgaggcactgtttaatgtcagtgaagtcaggcagtattgcatgtgctggttatggagcagcttcgaaagggaagggtgagttgagacagcctagatttcagaagacaaaaagtgggtgggctggtgtaatggagagtcaataaaagcaagggaaggccaagttactcagccacagtcactgcactttatatccgggagaatgttaaatttgtccaactttttcacggaagagaaaactgatgtacaactggctaagtgctttgtctaggctcttcaaagtagaatgtatgagccagggtgtggagggtagtttgttcagtacaaaccaagagctttgagcattgtaagtcaaaggattataactaagaatattcaaaaggccgtgtttcagaatagccaacccctcttgcttatacttgtaactgaagagaacagtttcactgaaactattgcaaattctgataccatggctgttaaaagtttcttttattatcattttgtgccaagacaaaattgaacaataggttagctctcatttctttttagtagtatatctaattttatcaacactgggaaagtcctccatagctattattagcatgaacaacaaagaaattccaagagtaaaagttgaaatggaggcttccatttttaattttattaacaatgaggattttgcctcctctagagccccatttttccagtcttcctattcctttgtcttctggctcccttccccccacttctcatcaagcccttacaggtcagaggggccccacagaggaaggagaagacaagcctgctttgtccagtcagcccttgcagagaaaggagctaagttcctatttcctccttgtctttctttcaattcctaccttcacgactgccactctcctgtcagctgcctgagccttggtgacaggatagctagggaaggggttcaaggccatggcttttctccatctgtgcagatctgggacagtgactctgagccagaatgacaggtgcgacgacttcacacttcagttcccatcagccatgccttcgcagtaatttacatcacttcggcagggacatcccgcaccatgaccctccagagctcagccagacctttgtagtcattcctaacctcatagccacttgactggacatggagagctgcagctaaaactgtcatggcttggggtgactttgctgttgagtgagaggagacaaccagaatgatgtccctctgtgacctcacctactgaggcttaagcctaatcgacacccatttttagacttttgaacaagaagagaaaggtgactttcaagagtttggaggggaggtgaccaatcccatactcaaacagagaggggactgctagagattcaggactggacagagatagtttttattgtctttgagtttgctgtctagaggagaaaagagatggacttttaaactgaagcacagaggtatactgagtaagcagagagaagtgttagagctctgggaccctggaccaaaactgaaggaaggaggatcaaggaaatgatgatggtcttgagactgagacagtggaaggggaaggaggggaagcgtgaggagagctttaggcagaggggagggcacctatgcaggactggacacagggcacaccaagcaccactgggaaagaataagattgctagggtacttgtggtgacagtgacctagaggaagaaaggaatgttttatgggaagccaccaaggggctctaactaggatggtgaacagagcatcaggcaggggtgctattctctgggaagagattaatatcacattgaatgattccatgtctactcagaataggaacttggaactaagtcccaaagaatgcctttcctcccccttgtctcctccttccaactttggccctcaactataattttgtttcactaactgaagttgtaccaaaacccatcctagagcatacaatctagcctattgcattctgaagacttgttaacctgcccagagtggagatttagttcctgccctcttaagatcatgctttgagcatctcctactgattcaaataatgggtaagaattgatgaatgtgtgggcttttattttcggcattcaacagcgaaattattttaaaaatgctttgctgagaacattgctatatgatgattatgattttttattttccaaatagaacaatagtcaaaagatcaagccagcccacatgcttgtttacgggatgtttctcttctctctgctccttccccatgacacatcatgatgctgaatctggatcctaattgaactcttgttaataaccacgataaatataacatgttgtgatctaggggttctttgtggggaactcagagtgctttgtaatttacctcctccccactttccattagagaattggagacagaacctacccattccctttctaagtatgatgttattatatagcagacctcccagttgtgtccttctagtcgactgtgaggatagacacaggaacagttaaattctcactctgtttttttctgctgaccacttatatttcatagcctctttttttccaggagtatattcaactggcttgctctctctctctctctctctctctctctctctctctctctctctctctctctctctctctctattgaattaacttggatatttgagtccttcagtaagttaagtatctcaaatagaagaaattcggacaaggttcttcctcatacagagactctgatcagaccagggtttaaccactaaggtttaaccaggtggttctagaaataaaagagggaggggcttctgtggtttcagcttccccaagcaattaccaggctgaaaccacacagaagccaaacagtaacacatttccctgggatacaaattttacaaccatcgtcatgtaaacttaaagcagaattggatctcagggttcaccagtcattccagtagtgttcaacatgggggccccgggactctgggaactcctggaattattgtaatggatgagcaaatctgtggtcccatctagaactggctgttctcagatgttttctacatgtaggtatcatagtatagtttttatagagtgtgtgcatggtgttgtgatttatagatacagatacatttaaatgtattgttattgaatagtggctttttcttctctttggtgagtcagcaaagcatagtgattaacaactgggtaacaatgggtaagtaaatccatgttcatacactatgctgtttgctacctgtttgactgtgggcatccagcctattttctgtatggctaggtgtccttacccatactaaacagagttgggtgaatagggattatgagtcattgatatcagttctctagggaatggagtgggacttgaacttgttgaaattacaaagaggttctttcacttgtaagataagaattgctaaaccattgtaattaagtgtgctgctcaacattggctgtcaataagatctgtatttattgaggaggcatacgcttacctgtgagaaattatcttgataacattaattgaagtagaaagacccaacataaatgtggacagcactctttcttggacttgggtcctagactgcataacaaggacaaagggagctaagcatgggcagttatcgtctatctggttcctgtctgtggatacagtgtgactagctgcttcaagctcctgccactgtgacttggccaccatgatagactagaccctcctcaaactacaagccaaagcaaacccttccttaagtttcttttgtttagggtaattttaacacagagatagaaaactaatgaagggaccaactcactgttacagaaaaagggcataaacagcactctcaattatgtttagttggaaggtcacttgcccacagctgaaggtggatgctagtgttcagtcttgtgtagatgtgggtgggagaagtggaagttggacatagctcttacactcttgaatagagcaatttgactagagcagagtgtatggctgggatagtcacatctgaagccaggcctgaacccagttttatgtggggcagtctaatctttaagaatgagaagaaggaaagaatgtcagttgaactgtaacacccagataactgcctgaagtcacatcttttataatcagcctgcatatcaatttctttcactattggctagaaatgggtccttggatagttttgttttattggccccttgcctatctttcttcttttcatatagttttagtgccataaaagaatatatctttttttgaagacttcagtttgaacataaatgttgaattggttactatttgagagaagagagcaatgtgagaggtgtttttttttttttttttgagatgcatttctgtttcctgaaactcaccaatgcaaatttatagattcgttacaagctgagagacttcacaggggaatataaaccaggcaagaaggtgtaatccagtctgtgaagttctcactgtccctggctcttattgcaggagtgtggtggaatgggggaggggtggaatagaaagctggtgttcttttaccagatttctttatttttcttttattgtgtgataatatgaaacatgcgtataatgtgttttgattaaatttacctcccattctgttccctcagatttcttccctatttccctgatacttctgctctcaatctcctgagctcttcttcaccctcccgagtctacttggtgccacctctatgtccatcggtttagggccatcgagtcaaacatgagtagcttctcaaggactgtatccctgaaccagctttcttagtaacactgcttttctgtccttcccatccgtcttccctctttctgtccatctaacaaattgtcatgtattaagtgcctactgaatgccaggcattatcatggaccctgcctacttgaaacttactgttaatccaggtcatagagacatttagaagacatgggattgcctggtctgcacttggtagtaaatgaaaatagtgatctcatagctctctcagcaacactagattaccttgatggtatagcccattcacaagactaaagactttgatgttgacagatctagcttgaacttcagctttgatactgagatgtctttttggccaagttgcttaacttacttgaatctatgatgttaaacacataaatatttttttcttgtaggagtcatgttctaggttgagcagggttaaacgttctaaaaataacctctcaaattttataggttagcataataggtttatctcttgctccttaaacagacaaatatgttaatagttcacttttttcccctctatttactgatttagagaccaaggccctaacctaggattctaccatctgccaggtctcatgatatttatgtggagtcagaaagagaatatgaattgtttcatatataagtggtgtacataatttctcttagcatcctattgacaagaattacaggtttatcgaaacaaaacaagaagatcctgtcctaattgggtagctacctctaggcaacaatactgcactgttgaaaggagaaaaggggaatacctgtttaggatccttttcaaaagacaagtgataactgttccattgtctgcatgcgggttagataaaatgcatgtgctgtcagacatatatgagatatataacaattttctattgattattagtaacactattaaataaatactgtacatgcatataactcagttgttaagaactgaggctaaaatggtaatgagatgcatgacttcaaagagctctcacatggctgtagtgtatgtttgtgtttgtaaatttttttttacctttggtatgggcgtttattttattttattttattttattaagtattttatttatttatactccagccattcccctttctgcccctccccacagttcctcaccccattcttcctctcccttgcctttgagagggtgctccccctctacccccgtaccccaagagtgtcccccttccctggaattctttctaggattaggtgcatcttctcccacagaggccagaccaggcagtcctctgctatacatgtgccaggggcctcagtccagacctggttgatggctcagtctctgggatctatcaggggtctgggttagttgagactgatggtcttcctgaggggtcaccttccccttcagctccttcaatcctttccctaattcctccctaggagtccttgatttcagtccagtggttgtgtgtaagtatatgtttctgtcttagtcagcttcttgttgggcctctcaaagggcagacatgcagggcttttgtctgtaaagacatcatagtaatagtgtcaggtcttggtgcacccctcaaccgggagatagatcccaagttggaccagtcactgaacagcctttcctttagtttcttctccatttttgtccctgcagttcttttagatgtgaacaattctgggtcatgtttgtaaatatttaaatgtataattataatgtgaggctattacattaattctgaagaaaaggccagggaaataaattttgttgcatttgggtctcactacaaacctttcgttgaatgcttgctgtatacatggcccagtaatatgcagcaagaacaataacagagttcagataggaggcggtacagatatgggaatttggtttccttctcctcaaaggcattaactattgatacttggtaggtacaagtgtaagaagccatcaaatcattttattccctcttagtgagacttgcaatggtaagaatgagaaccagtttgtcttgttttatgtttattctccctcccctccgggatcacagagaccagcagtagttagccaactgaggttggtgatgactttctaagttggcctagataaccctgctggttaagacctgtcagactctgaaccagctgacccacttattcatgtcttttctattgttagtttgtaccaagacgtgttaacgtttagttatggggtgagtgtagctacaataaatagagtagatacagaagcaaataaaggttaccataggtctttggagaaagaattattgtggcaatagccctaaaataggcctttggggtgtcaatttcaattatggctttccattgtgggcagtcttctatatagggtcttataactggaccagtaagagctgctcctatcaaaacagtttaaattaattaaccaactagttaattaatgtgaatgcatacactaacatgcatacaatacatgcctctttttttaagtgattattttatgccagttgtggtggtacatacttttaaactcagaactcaagaggcagaagcagacaggtctctgtgagttggaggctagctggtctacaaagcaagttctaggacatccgagggccattacacagagaatccctgtcttcagggaaaaagttgttattattattattattattattattattattattattattttgtgaattggtattttacttgcatgtatgtctatgtactacttttgtgcccagtgcccatggaagttagaagaagacattagaatatcccctagaactggagttggtgagctgccagagaattgaacccaaatcttctagaagagcagccagcactaatccatcttttgaaccccacaaatgcatgtcatagcaggtgtttggcagttaggggacaacttgcaagacttagctatctcttttgcaatgtgggtcctggacaccaaactcaagtactcagacttggtggtagttaccttcacctgtcaagccatctcattgacttcctgttactttttaattgcttttgtgttgagttttccttgtttggaagaatttaacacaataatgttttcttataattaatggtttatattcttcattttgtatgtttgctacttattaggccatacatcttactttatgttaatttttctcaattgatcagagtgttttaaattgatatttcatacttatcaatcagtttattaaattctcaatggagactcctttataacctacaggcatggatacacagagaacactatgtttagtattagatttattgatgtttctcatttatacagagttaataataacagtcaaatacactcaattctaattagaaataaaataatttgttgcagtcaaaaacctacccaaacaaaaatgaataaaatcttggtagtgatcttcgttggtggtataaccactgggctagttgagttcctgagtcttaattttaggagagatactaacctacaaaaggctaagatttgatggacggacatacttgaaatcatctggttccttcattgttgctggtaccacgccctgtcaatctttctcttcttctattattcaccaaaagtcactagaatgctttgtggtgttatctgtattctgatcccagtgttacagagtagggaacccattaaaacttgacggtgctcctgaaagcagctgtcctggagggaaagagacggaacgaaagagatggaacgaataagaaataagagtgttaagaaactttgtagctcttgaagttagacacagggtctaggtatgtgcccttatatgggttatcttttatcagaccatatctccatctatgtttcatgtgtgtccttcatatatcttgtcctgaggagagtcttgaatgcaaacagcatggcagagatgtttccccacagagtttgctctttatcagtgattttgttggaaggatttgcaagcttattccttactttgaaaagagcatcgcttgcttctccaaattgccccaggcctaggttctacttcctttctataagctgctctggggaccttcccctttcttcctgcttcattaacatccctaacctctgaccctgacccattggtctattctttgtggggaggtccagtcctgggatccccagctcttcagcctggcagacaaagcctggtcttagattgatgtttgaaactgaatttaccttaggaaagtcaagagacttaaaccttgttttactaataattctaacctgctgtttgtaggcagactcacgtctctataggcaaaatgggaatttgtttgtgttcatataagggggaagtgaggaaggaaagcctagccaatgaattttgaaagataaccctcccctccacatagagagtaaaagcaaactgagatattaaaagactataaataggttgtatttgtctctttatagagacatcctaggactatacatgcgcattcaagtgtacgcacatattctcttccccatctcccttctcatccccccactcacacagaaattggatctttaattttttctacactttgattttttcctattgagtacgatcttctttttacacagtcctttccaacactgtcatttctatcagtagaatagatagtctctgtggttaggtatcgggaagagactttgaagtgggtccctgatgccaggattatcaccggccctgcctgggtctacttaggttccctgactgaatgcaccttattcactctaacttgaaaagactagagagggagactttagagagtcatgagcttgccagcatggtactgaacatttgtatgtggaaacattttccccgtaggggtaggaacaatagattttcaccaaatgagcctcagacccacacggtaggaccattctattaaatcacctcccaggctctgtgagcttaagaatttgtctggctttttaccctcctgtcatccagccttttctggtttgtttgatggctttgtcaatgctcagctacagaggactacagatatttttcttttctctttgttgtacattgatattatagtgagaacactagaccacaggccccagaaattcaacggatgactagggatgatatgtttttctaccattacttttccatttgatttttagggtgagtgttagaccagattttttgggagttctaagagtctttggtggctgaggtcttaagctacaatgtgatcaccatcaatggacccagttcctgagacatcgcagtaacttgacctctaatgtcaaacttctcctttctctggttcattatcacattcttggttgagtaacttccttttggcaagattctctttcctctttgaaacggcaagaaaaagtccatattttgaggtatcagagacttcaacaactgactgttttcttcttgttttgatgttcattgcccacctgtcttatctctggaaccaggacttcttcaaccaagcaagactggattcttttgtttctgccctgtctcaaatagtttttctctgttgctttacctgcaattacacttttcttttagaattattattattattattattattattattgcctttagcaggtccattctatgatgttctgtcttgtaaaagacaaggttcattagagaaatagccttctgttgtgtacctgacatctatataaccttttcttcatagactacctagcattgcctttcttcctgtgatatttctgtggggcctcttatttctttactgaggctgacagttggggttatgttccctttttcatgctctccaaggtatttgtagtctcatacccataataaatgctaaacaaattcaaattcagtgtaagagttcaaagccaggtctgtgcatcctgcccatgagtctaagggcagtcttattccaggtccacccatggtctacttaggctagattctgttgtctttatcctgtatttttcactactgcaaccacaaagcaggatcctagaccttgaccaagtctagggccattcagattgaatgtgtacctgctgagctcacagtcttgctaagagttctggggctaaaggaacaggatagagtgtcacagaatgtgtccttgatcaaaacttgggagagaacagcatgatcctccccttatgtttctgaggcaatctctgttacttacccaactaactcagtagaggctattttcttgccgtgtgtcatcactgtgttgtttaaaataaatgacatcttggtactatcagttgtttgcagtgtggattctttcttcttcaatcaatctctcttcccacttgcctgcccccatctcttcctggacaattagcaaagtgtttggtgtttggtttggatgaataattaattcggaagctttgtgaatgattcatggcccatatgctggggcaacaggatgtggtgtctgtgtgtttgtgtgtgtgtttgtgtgtgtgtttttgtgtgtgtgtatgtgtgtgtgtgtgacacagcataggcaggtcagaggcctctccttaggtcggtggccctaggctatgtgtaccaccccagtggcagaataggttgcatgtaatcttccgtttggagattcttcagggaaaaaaaaacaaacaaacggttctccatggttttatgtattttaattctagactggtgttcctagtttgggccatggtacttaatgaattggagtttatatttttaaaagtagctattgactgtcattaagatgggtgactgattttacatgtcaaagctttaaagggaaagaaatctctttatttccttgcataaagcctcctaggcaaggggcaatgctttcttcagattgtagccttcttactccttgcgactatactacttttgtttcctggtacagctccttcctggcagggagaacacctggctacagttcactttgtaggctttcctttgcctttgaagcgtgttcttatttacttaagtgcatgataatatggggctgatgcctgggctataaacacgtgacttctctttctgccttggtcattttgagtagtgactcctgaatatgtcctgatccctgaaagccaacaaaggagaaataaatgtgttacataaaatcctgaactgagttcattgtctcatagacatacagactccacatttcattatatatcagtaaaatagagagagtctgggagtaaaatccaaaactctggtaagatatgatccaggttttggtaatttctttttcagaagagtaatgaaagcatttttttttctgtagtccctagtatattctaaggttgtgttaatcatatttttgccccccatttctatagaacttatttgtatgtgaggtgtgaaatttgactatacctatatttcccccgttgtttctcagttccgtttacaacgggtcatgtcttccccactgatttaattctacttttgtttgtatactaatttcccaaatacacactctatctttaagttctgccttctactccattggctatttatttgtagactgtattttttttgtactgcttttttaattagtagagctaatctcgaatttttctttaaaattgggtgatcctgggctttatggttttatatgaactcagagttgatgtgtcaaaagtcctaagcttttgttggaaattccgtgggtttcttgactagaatgggaggtattgacattttaacaatgccaaatgttagcaccatgtcttctttatttaaaacattttaggtcctatgacagtatgagggagatttccattcataacctgttgctctcatattacctattttgtgtctaattctgctgctgtgaagaatgcatttttgtgtgtgtttctattcaaatgttgctggtatgcatataaatattattgtttcttatttgttgatattgtattcatagatctcataaaattcttttattagttaaaataagtctataaattctcttaaattgcccatgtaacaaattataacaacaacaaacaactattattgctttctaattggcctatttatatttttcttactgcactagctataggtgccaggagacgttgaataatggcagtgagcaaccatttcatatttcctcttctttcaggcttttcattgatggatgtctcttggagaatgaaaatgagtaacttttataaagggcataaggaataacagtcaatgagttttaataatagctcagtgttttaatttaattaaactaaaagggcattgattttatcctgtaaatgattaaacattgaacttattaaagccattggaaaaagattcagttaaagtttaacaaaaatttcatttatttttgcagtgagcatgtgcataggatttgggtggaatgtgctgtgattgtataaacaaaggtttttacttgggaaatttatggagcaatagtatgtagaatgagtcatgatgagaatataactgataattatggctaagaaagtgggatatcgcacaagttgaagtagatgctgcaggcaaatagcaacagtaaagaaaaaaataggaaagttcagcaaacccattaaaaatcaagaagggagagaaaaaaagaagcaattggaaaataaggagacttgaagacagagtagaagtgactcctgaccaatggcaaccagaactaatataaacagacagaactaatgtaaacagaccctatcaatagaaatacccaaaatgcacaaaatgtcattggaggatggaaaacagagtgggtggaagaagataggctgtataatgtcaacatgaggacgtgactagtgatatagtggttaaaaacaggaaggtgagagtatcagggatacatggcaactggctcatcagtccagatgatttaaaacttatgtacactcagaataatatctgctggaataagggagctttctagttgggtttgaagaagagttgaccaaagtttagaatgtatgcaaattatcactattttagacagggcagtagaaccttggtggttctaacagttagacaactagactgataatgaacagcaagagaagggaggtgttggataatcctttgctttcttggtcttttcagcctttcagaagacttgcagatctgaatctgtgtgtagagaagatactggaatttcagatggaatttaagtttgtccaagtatacatgtatttctcttttgactatatatataataaaatatacacatgtgcatatattatataccgtatatacacgtgtacatatatgtatatatcatatatatcatttacatatcatgtatacgtgtacatgtatgtacagatgtatatatattacattcacatattaccttcacatacacatactgaataatatttgcaacacacacacacacacacacacatacacacacacgatcacagatgggattcctttaagaaaatgttaatttctctaggttttctttagttgttttgtttcctttttttaaaaaaatcttttgtggatgacaacacttctaattattgttccatctcagaggacttctcttccctccctctggaaactgtagtgtgctgtgctttcttcatgcttcttctgttcttgagtttcactaatctgtgccttatgtggtgatttttatttttattctccatggcattttagggggaggacagccctttccttctgaaggttaatagcttcagtaagggctatgagtactttggaatgttgcatccactctccaagttttttgccctttattccatatgtgtgtgtgtgtgtgtgtgtgtgtgtgtgtgtgtgtgtgtgtgtgtgtgtgtgtgtgtatttgttctgcatttctagcttcatttggctggcctgtaactcttcataaatcctttaaacagccttttttcttgtacttttcatttttttatggctttgtatgggttctggaattttgttcagttctgtctctttgtgtctagttcagctgtctatttggccattcagcctgtttgatggatattagcatttccagtggttgtaagtttcttttgcactgtctctggatgtttgttcaaaatgctgtgatatccccatgctgtcatttaggctattcatcatatgcatataccgtgaagctcaagttgtttaatgaacaattttgcttttttctctttgtttgggtatttgctaagtcttgagtatattgccagcgtctacctgcctgtcacagctgtgtaaactgcttaaagggaggaagactgtaaatccaatattgtagcactactgcaaaagtgcaggggcccctggcagttggctcactccactgtccagtcatgtgggaagacactgctgttcctcccaggcacaggtagatacaatgaatgcttctcctctcccactagccatgcctgtttctccagtccaatgggcacgtttccccttgctcttccctggtcgaatgtgggaagaatgataggaagcagagccaggagtaatttcaattgtgtaacatttctgctaccaaacccaaactgtcctgttggtcacacttggatgaccactgcctgcagacaagagcactcctggtaaagtgcccttgttgagagctgtcacactctttttgagtttggaggccccagtttgttattttgttttgagctagaatcttgctatacagctctggacggctgggaatttgctgtgtaaaccaggctgtcctcaagcttggagcaatctttctgccttaacctcctgaagtctgagagtactgaaacgtttgtttcttttcaaaaatcccactgaattcactttctgtcctgatgggtctatcagagcctgcagattccgttgccttcttgatctccattggagtttttatgtgtgagaatgaaaggtgttctaaaaatttgttagaggaggaagtcatagtaggtgctcttatgtgcttatctgagaaagaggttagtgtcatttctatttcttttcttatttagtttcaattacatgcgtatgcccatgcatgtgcgcattcatgcgtgtggtgccctgctctatcactatccactttacattcttgtgacagggtctctcattgaacctgaagctcaccctttttcagccagactgtctacccagtgggcatgggcatccagcagtctacaacctaactacagtgtggggattgcagtgttacaagtgtgtgctcatgtctggcttttacatgcgttctggggcatcaaacaggtcctcatgcttgtgcagtgagccttgcatattgaaacctctccctagtctggccttcccttttcttacggttggaatgagaggatgatgatgagggtggtgatggcaatggtgacatccagcctgtgtttttacgttaagtactgtccctatatttccctactgttcacatgattcctcagtctccatgacatagattttattactgtggccatttcatagatgaaggaactgaggtacagaaagataggatgatttactcagataagtgtctaaactaacttgcattcgtttgaagatgtttgagctgacacatgtcaagcacttgccatggtagtaagattacaaaaaatggcaactttcattttcctaagagccaacagcagagatggctgataagagacgctaataaataactcaagaatgaacagagagctagcacaaagttctatttcactgattccaaagaagatcctatggatgcggttactaggagaccatcctaccagattgttgttgtgtatgataaaataactgtgggtttagggaagggcagagcttgattcatactccaccagatgaacatcttacagttttagctattgaattcatgctgcttgaaactattttaatttttttcagatttgtcatatgattgtcatatgatatgattataaataaactagtttgtaggtttaaagaaaggcaatgattttgatctctcatatgcagaatactgaaaaaagatgttaagttctactccaagggagcttaagtgttactttctacacacagtcaatcctctggctagcttcagcgacttgtattgtagctcttgaattttgtgctatttcatgtcctttgaacatgcttctttgtctattgttacaccatcctgaccaactctcttgactatcatctcttcagctgactatgactgccttcttctcatgtccctccaccttcctcctttgcttaggctgcctctcaacttcacccttatagttggtgggagtgtcctctactgtccccaggtttctcattgtgggtttgagggcagcggtgatatccttgtgtgcctggtgcttagtaatgagtcagcaaacatgagtcaatgaacagatgaaaaactgagtaagctaatgcacagattaaagggtgacaggtgtaaaaggaagtatgaattttggaaggcaggaaaactattccaatgatgtttttaaagctaagtgagaaaatgccatgttcactcaatcttggtccagtatcactgtcatgggaagaagtttctattactactcatctgtctcccttctattaccatgctataatgttactgatgctgtatgtgaatccctcaactccagttgcccttccatttctgagtcccattagaacattccataattgtaaaagcaacttgggaaaatttgataagactttctttttctcacttaataaaaaccctttcttagaacagtaacttttgaatgttaggtataaggctactacattacttcatagataagatctctgttagaatctactcttttctccattagaagacagatcgagagtcaagactttattttcaatctccacatataaaaatgatatacgcaatcacatgtattccgtgccttgagttaaaaataggataaaagcaaagtctgactccaggtcttccatgttttaacatacaaaaatgtcatgttagtctatcttctgtctctgcccacttcttcgtcactctggataggtgctgcgtgaacacctcctctccgggtgctatgtcttgtgtgctgctagcacaatgaacaggtagaggcttcagaatgcttatcacaagggagatgtgagatcagtgcaaaatttacattaacgtaggtatcctaatagctccattatgtggaggggggcagaatagtctcatacatgctcagcataaacatcataggtctgttgctgcctcaccaatagtctatcctgcatcattatctcaaacatcatagtgtaaaggtttattcccccatgttaccattataaattgtgatctatggtgaaactgaatgtatatagctttatatacattatatatatatatatatatatacatacatatatatggcagcttttatttctcgtttgcctgagagctgagagtagtccctttgtaatgctcaatgagaattgatcatgccagtgaatgaagaattgaatggaagatattaaagggtggaacattggaaagatataggactcaaaatatgatatctccacgtatggcctcaatatactgactatgttaagttgagggaatctgaggatcagtgtgtgtgtgaaggacttagtgagcatcctctgaagcaggtcatacagctctggtgttagatgtcccccaaaccccaccccgggaaaggagaattcttatccccaaagatggtggctccttgtagaatctgaatgaacagaccttgaaaagcttcccatggctcattgcacttagctctttatctttcagttctgtcatcttcccctatgacattctgtgacattctactcctcatcaaacttagaacacaaatacccaacagagtcatttcttggggcatttgaaaaataaaattcttgtcacataaaacttacattaataatcaaagatttgtgttttctacttgattgcttatcttctcttgtagaactctggagtagaactagatggtgggctctcacattgacaaaaaggatgctattgagggtctaagagtcctaagattcaatagagttttaggcaaaaatattatgtttttctctctggaatattggccagtctattgccatagttgttcagaaaacatgtccctgacaacaaggtgggcaagttcaagtagcagagttggatagctagaagaatggtgagctgtgaggtccccttattaggtagggagacaggacagaaggaaagggaagggcaggcttctgggttagtggtagcaacattgccgagaagacaagcagaagcaaattgatgctcagctcccagattagttaagaacagcctaattagctaatgaacaactccagccctgaaaagctctgttatggggtgagctacaattctcagcagcatctgcagagtgtgtagacgtgctaacacagagctgaggaacacatgctaagttctgacccacaaatggctggtctttttatgttacacttgcttaagggaatttcagagagccttgtcatcaatgcaacagagtacatgtgtgtgtgtgtgggggggtggggtgtgagggatgaggggtggtggaatggagaggtaagttcaagtcccagcttagttatatcctagcagagtagtctctacctccttgtgatcaagaaaacacatctgaagtgaggatgtgccttttttattgcagatatttattgtgcatactgataggtttcacacagtatattatgtattttggttgtacccatatcccttctttctgtcccccttccttcccttatcattcccattgtatgcatacctcttccctctgctttttctttcttctattattctcattgtgttcacctctctctctctctcttcctccctcccccctctctccccgtccctactctctcctattattctcattcatttcctcagagagttgtggttcctctctcatgtcctatgtagatggttgatttttacacatctctaggaaatctagaacccataaatccaataatgcttgtgcaatttgtttttctgaatctgactttgggactctttttaaaaagtgataaacatgttctgaagttagatagtggtgatggttgcacaagcctgtgaaaatagagaaaaaccactgaactgtaccaattggaagcatgaattttgtggttgcatatataacccaataaagctgttgtgaataaagagtgcatatagctcctaaattaggacagtagcaaatgcaaataagcaattacagtaacgctgtaaccctgtattcatctaaattgccacggacacattgcaaatggtagtggtggtgggctggtatacactggaagtgtagctatagatggccctttaactctcttctcttcctccttcctgtttgaagataacaaatgtttgttgctgccttcttgtagctctgtgtgagctgaggagatgggaaagctggtgaccctagatagattggtaattgcagagcacaaacccttcatcagctctgcagtccacagagggcagcatgtgacagacagcaatttaaagggccatcctttatagggtttagttggttgtttggtcctttgtgattgcttcttttgtattttaagaaggcttacagtcataagcagacttggtggctctaagcggctcttcaggctttatgtctaccaaaagtatctcgggtttttgtgaaaatgaaaatgttggccttaccacagacagttgggacttggtagttacccaggccgtcaggtaattctgatgcagatgcttcatggactatatttgggacctgagggagaaaaatcatcctgttatattgagaaatataagcatggggccaacctgaccaacttcaggacgtagctctccagaaaggaggagaagaaaactggggctagacagcctcacctgtctctgcagtgttaaaccttcttattgtttagtagccctgggactaaccacacttctcatgaaatttaggcccaagtcttctatttactttttattttgagacacaatcttccagttctcaggctagcctcaaactcatcctcaccatgtatgatttgtaattgtgatccacctgcctcagcctcctcaagcttttaacataggtttgaaagaaagatcagaaaatattaacccctgttaaatgcactactatatatatactgtcttttgtatacattaaagatatattggagctattgtatagtaacgagtatttggaaatctttgaggttttaggtgtaagaactctactaaagactagctgaggcagagaagcagttggtctgtttagggtactgtggtttccagtcaagctggggataatggcggtggtctaagaagactcgatggtcatggctctggccctgccactctagctctctcacaggcttatctcacatagactagctgtgattgcctctggctctgctcaagctgcccatgagagcaaaattcaagaagtggagaatccatcagctagactttcccctatgagaacagagaagagtaaggaagagcagggacagggaactgcagcctgcctattctgccccaggagacttttcctcgggggtttggatggatttcatatctggaccatggtagctgtcaattgcatccctatgcttgcctagcttctaagctcctctgttttgaggagagagtttttgtttcctagctcgctgctacctcatggccctcagcttgatcactttccttgttattccttcggccgtgtaccttccttggctccctctcccccagtgatggataaggagagcaaacaatccccgggggctgggggtgaactgaagactgagcatcacgtggccatcaggaggtgttagagatcacggagggactgcagaacaacgtgatgaccagcctcaactggagaaaaactgacttgatggaagaacggatcatgacagagggacatctgctatggctgacagttgtaaatgcagaatactcaacaagtaggcaaaggattggcttggaagggagtatgtgccaagtattcaagtttgaaagcagtcttgggctggctgggaagctggccagtgtgtgttatccttgagagagggcgttggtagagagatctcactctggcctgaggttggatgctctgggcttttgccagcatcttccttccttgaacctctgcctagctgtctgagaacaaggagtgcccttccctggccccacacatgctcacctcctgcattcctgttgcccttgggcttttcatgtggcctgcttcattatggccactgagattgcacctcctttctatgtcatgcctgctgtacaattctagatctgttcttttctatgcttggtgtgtttgaaattctacagtcacatggggaactctgcggatccccctctaggctagaggagaaggaggaattctcaatagacagctgctgaccatttatgttgttgaagaaaaaaaatcatctataatagataaccgctgctgcgcatgatccattgtgatagtcaccatcttcccatgttgtctctgattctttgtcacaagcactaggctttcagggcacaggttttgagcgtgagccctagaccattgtgcactctgggatttggacctcagtatcaatgtggggtcagcagtgttgaagtagaattagactcatcattttttctgcatttgttatagcatttgttatttcccaactcctgcctgtgtttttataattttatgtgtatgagtgttggcctgcatgtttgtatgtgcaccagatgcattgtctggtctcccgggaagctagaagaaggttttgtatattctgtaactggagttagagatgttgtaagccactgacatctggtgttggtaattaacccaggttatttacaagactagcaagtgctcttaacctctgagccatgtctatagccccacagtaggcactcttaaccctttagccatccccccaagcccctcacatctgcctaaaaaaagccacatgttttttctgtttgtctcttggctacctctatctcatgacttggatgttttcatggctttttggctttctgacatcacattctccccagtttcttctttataagaaatatcctggagccccatcttcagagagcccccatctcctaagatgtgaccctgaatgcctcttcatttcctagtccctagattctgtggtctctttgtggcctgtagtggcttcctcagcagtatgctgccctagatgtcaacttctaccccagaagctctagacacctgcctgcctctgcttgctcttgtacacactcattactccatcacattcctcccgatgacctgccatcctcatcacttgcttcttgtgcatttttccagtctttttttcccttttttggcatcaagagccacagttcatttgaactagagggaccttggagatcctttggtctgacttctctctggaccttcgagaggagatgacttgtttgttgtgagtacagcaggtctgtttaataccaggccttctttttgtagtgcatccctgcttccatcacaataggctacctaaaggtgataggaagtgatctcactctcatctaactaggatgatgtcatcaatagagacagagatgcagtggagatgagaaaccatgtttgtaggaggtttcttattcattgcttttgccatgcaattagcatcatattatagtctctactcatgcttactgtcacagccacagattgagccctttattgtatcatcctatggcaccaatttgtttgctatttcatgcaccaaagtaaaaactgtctcaatgacgtatcgcatagctccaggcagaggctagaaccaactgtatgcttaattcacagagtatcaagggcaagtctagaaagcctcacatttgagttactagatataataaagacctttccactcacagcagtgatagcttttcttaattgttgaactgaggcttcctagagtcccctagctagagtcacggacacgtcctccccttctgttttcacaatactttattagcatctttgtttttgctcagatagtgtgggtcattacgaacagactcctgcctcctcctggattttgagtttctggaggaaataaatagactttctttgtatggctcatgggagtctttggccatgaagtgtgtcatgttattttgctcaatatcaggtagctaaattggatgctctaagtattgacatagttaacttctaattcatatgtgttctgtctgcccatctcatagcctccttttacaatgtggccaaaccccagactgggactaaggccaggctgggagggtttgggatgatttccagatgggcagaggtagttgtgtatctgggcatgcctataaccacatctcaaagccaagtatacaatcaattaccttggtcttatccatcatatttagttggctaggctgcttcttccattagcccagataatgaagagatggcatttgtattgtttatgttgtggcacagaaaacaatgccccatctagataacaaggcatagtagccttttctgaatactcagatggaagtggtctggggaaaacaagcatgtctgagaggaacagaaacaaagagctagccagaacaaggaattagtgagaatgctggacatttggtttcttataagaatatagttttgttttaatctcaggtgtgagatatggggctacttcagattgtcctcagcagctgactctgatttgccttgagcgttagcagagccatggttttgccagctgcaggtcatttctttgattatgtgatgttaggagttgctggaatttttcagtgcatgtataaatgctagggcccagagaggtggggtgggttgttggtggtttgttgtttgattttgctcaaggtttgttaagtagccatgtgcaaagaagaaacaagaagacagtggatattctgatgataaagaacaaacttaccgcaactcaatggccctggtcaacagaaagtattctgatagaacatcacctgctctctgacaactaacttcgttcaggaatctctttcctctctcatctttatccctttttctctccaatttactactaggggtttaaagggtggaaaaggagtggagaatgttagaagaaagaacccaccaaatagctaaatccagctacaaggaattgatctgcattgatttcaagccccagggatcttacaaatctaactcatcttacagaattaagaaatggagccccccactaacatgagggttactgaactggattgagccaatggaaccaaagaggaaggggactgatacgagagacatttattgacatttaaccctagaggatggggggaagggggaatcaaagttgaacctcaggctggggggtgactccctatattgaggtgtgttaacattctggataaggagcagtctgaagtgtggagctttgaggatggttttggctctgtgagttcaatgtgctgtttgaaccattgggtagcactcttataggagcactggagtttaaggcaggggaccttggacttctgggatctatcattatatggtggctgttggaacagtagataggggctagattcttcctggattcctaggagagagagagatacagagagagagagagagagagagagagagagagagagagagagagagagagagagagagagagagagatgggaagagactggtgacctgagtcgaagccaacagtgcatgggcagatccaggtctctagcagggtggttgttggagaccattaaagggaaatgaaggaagacagagattctggaagaagaaaatggttctctgggtcaaaggaaatgtagaaaggctatgctggcaatcgcctgggaaaccccgatgtttcctattcttactctgtaagtgagtgctgttcctctgtggcagatagtaatgcaccaggagaggaattcttcctgctctgtgtcttagagtccacacgtaaaagtccctgctggctctgggctttagtcacgtggcatggaactagtcatccctgggcagtttgcagagagagggagagggggctgggtgtgagagattggtgtcttaattttagcaagacttttggagctccttggaaggcaagctttatttctacaaaaatagaaagtattattattactacatcttcgtgctgcattggagccaaatactggagtcctcaatactgtatttatttccctgggctttgggaagggtggaaaagaatgggacatttaggttgctaagtgacgtgcttctaaaaatattgagattccctagtggctccttctcctgttcttttggttggactaagaagatgataaggtcaagtaatagcctgaccctgtattgaggtgggcccaaggcatcttgttggggaagaatagaataaactctccctcttggaccctcctacctgcttccccttagggcctactactttgagaaatcacaggaaaaactgggcctccccctgcctgaatccaagagccttgcctaggcaggcagccctgatggttgccatggtgatagtgggtggttgggggaggcggtgatgcagcgtttggcctgtgcaactgaggtccccaatgtaggctgcctgaagcttaagctcctgatactcttggcgattcttctaggattccagagcgtcacttgctacagtgttgaaatcttcagaactgacaggcatctagacagccgaatcaatccttcattgtttaatatgtatctcatagacccataaacttgtgggattcggagctccacagagaccttggtaggggaaagtatatgcagaagagaactctgtgcaggggagaggggctaataccacagacctgagagtcgggggatgtatttaagagcttctaactcatcagcatccctgacaactggacactaagcccctgagttgacaatgattatgatatgaagttcattatagaacagaacagaacacactatttcattgttgaattagatttctctttttctctttggcaaaatctctcccttcctgacttgatccagcctctcaaaagccatgcagtaaacagagcacgaatgccgtcgtctaaatgatgtcaccaaacaaaacattcattcttttgttttttatgtatctttttgtgtgtatgtgtattcacatatgtggctatggaaacacatgtgctatggtgtgcctgtgtggggccagaggacaacctcagttgttggtcctcattgttggagataaggtctctgttggtatagcagcttagctggtccatgaccttctagggattcttctgtttctgccacacccatctcagtgtaggagtgctgggatcacaggcatgagtgatcatacctagctttactcgggttctgagggtctgaactcagatttccagttttgtgtggcaagtgctttggcccagcctccaaacataggtaacttttcatctgatgtcatctctcaatgccttgctatgtttctgccttcctgaatttcaacatagtttcttctcatacatcagtgtatgctgattatagtaatatcttgtgttatgacattttcatacatttgtatcacttgctttgatgataaccacacatagccattgaccttttgtctcagtattactttttaaaatgggacactctgaacagaacatacagctgtaactggtctgctcctctgtagagtagctcaggacagaaggcacaggattggtgaaaattctgagaatggtatgtccccaggccataccactgtcagacatgaaacctgtgggagtccttcccagatctgcatatggacaattgaccttgttctctacatttttcccatttaaactgttgataaaaattgctgagtgagaagaaacaacataatgatagaactgcctttatgaagtttgaatgtataacataatagcatcaacagctacatacacatacacactcacacacatatacatatgtacatacatacatatgtatatatacacatatatccttctatgtatttgcttttctgttcttgcatcccatctgcaatctggcaatcaaccactgttcttctgaggtggttgctgtcattacttcattaatgaagaagtggaatcacagagaagttgtgtccattgcccttgggcacgtgggttctagtagcaaagttggtatgttgcaattcagcgtttcatctactgatcaatagaatttggaaaagatgttttcaagtgacagaaactccacgtggtcctctctgccactgtgacagtaggatgtcggcgtgctttgctaatcaaccagtaccaaatgctgagcattgtcctgattgatctgcccagtaatcctattgaagcagtcagagagattccattggaccggttcatcctaaggagccttgggccagttcctgagaatggtaagtggtggctatgctgaggccttaccacacctgagctgctcttgtgctaagcactgagctaccattcctgtcctgcattatatgagtatcttactttcttactgttctcaatttgtctccagtctgagctctttttggagttgacagtctaatcactctagaatcttcttcttcttcttcttcttcttcttcttcttcttctttttgaattcaagatgttttattagctttcatgtctgcccatttgaatagtttgttcacatgaacactgaatttgggaggagagtgggatcaagtataattctgctgtagggactatctatgtggccaatgttaaaccatggaattacctaagctttagtcttctcctcttgaagacagggacaacagtccccatgcagaatacctccagatggtgaacacagggatgggagaattgccatgtggacaatgtacagagaagtgcttttcagcttcaaagtttcaaagtgctcactccactgttactgcataaaatgctccaatgcttagctttgcattgtctctgatctagattccattttttaaaaaaaaattgacttattcctttaaattatttgtgatatttatgagacagaacaacagctgagtgtcagtcacccacattggaaaggggttccggtcatcttccactgggtgggattaatgagggagatagagacagacaagctcctgaagggcaggggtgctgccttgtcccagttctctcagcctgaggtagagtgcccctgctcctccatcagtaggaaacctcgaacaggctatgagctatgagcagctatgagcagttatgagcagctatgagcagctatgagcagctgtgagcagctatgagcagctatgagcagctatgagcagctatgagcagcctggagggcagggacccttacacattgactttcattttctgctttcttcctccatccttcctcagccttcgcaggctactctggtgccacctgcagtttcttctgggttgacatgggaaggaggcaacacagagaaaaagaccagctgctctctctgtgactccagcagttcttggttttccttgggaaaacctaaggccttgatggcagggggcgggactcacatggtgccaaagttaggggccactcactcctgtccttggtcttggtccttggagtatgtggtctgcttgattggaaagtcaaaggagataggaaataggacacacttacattaatatgatgacctgtgcctgcaggaatggatgacagttgaataaggccaagaattatcttgccttacaaactctttcttcagctatatgcagaaattcacaacaaagcaccaccaatccttactcactcaactcagcgtgacaaaatgaatgtcttaagaacaatggaaacatgggcctacacgagctgtagtctttcgagtagtggaggttgtgtttagctctccagatactgttgctggtggtgttatgctagggttgtgtccatatgtcttccttcactctgaagatatggccaaagagaaggaggactggggtggcagagatgtgtgggtgtagttatggacttggggagtccttctttagctgtaatagtctgtgacagatgcaggaaatctagagaaggcactgtttgagtgcacaggaacaaggacagaattgattggctcatcttccctagacttctcatggtcagagagcctctggctgatgggctgagattgttcccatcccataagccccacgaggatcttctctcccaaggatggttcccctcaaatagagaatctttcaagagaacatggacgagttgttggggctgggagttgtgagtggggctaggtagcagcatggtcatgctgaagtcatctgaagcttcatattcagatgggttcttttcccccagtgcagctgcagctgctgttacaaagaggtgtaaaatgcaggtttaggagaaccaggggtaattagctcattcacagcctttcttagagttcacacagaattctgagcacccctcccatttcatttaaatatgtcgggagaaggtgagatcagcaggtgcaaacatcatgtggtgtcagaacaggaagctgaggtgtgcccctcccgacttcgtgccaggagaaagggttttaatggggctcaggggagtgtctacacgacatcttggagagtatgtggggtcagaaatcccactgtcctcctccctggctttcagtattagcttctggaagacttagtctcctgactgccagcagggtgtctctgatggtgccgcatagagtgctcactcatgaaccttgtcagaaaggctcagagtagggcaggacctagatgttctcactgggaaaggctgctgaagaggccggtgtttcctctctagtgcctcttgatttttctcttgagccttaattttccctgtggaaagacacagacaacttctaccttattgtggccacccaaaagtacctgaaactctttctccatagctttcctaaacctcctggaagctacatgaagctggcattccttgctggtatgttgagcgttctgaggaggtggagataatggacttccatactctgggatttccttcaagttcagagcctggctcccttgaagcagaacttcataggtcatctcacctgttgccctgccaacccatctcttctaaccacccactttctaaggccgtgcagcagccttctaaagcatagctttgctctcatgattcctctggtagagatgcatctgggagtctttgctgcttcctaggtgaggagggggagcaggacttggcatacattaaggagtgatagactcacagggacacgtcctctggcttgctgtgaccagccaaccagtgtcccagatgaaggtttgtcaggctacttctaaattgagcctggtcacattgcctgtgcagtggtttagaaatggtcacatcttctatggaaacagcaaaagggagtggatctagacagaccaacccataatagctggggtttgtccacagagtggtttatagagtaaccagaatgggatggaagtgggcttggaggagacaagggttccaggaggaaatgacagtttgggatacttgcaggattgtcttgaaggaatataaagaaagggcactccaagttctgggggtaggctccagttcctgcaagggtctgaccagaggctggcatgagcttagcctgggacatttgatagagttctatccattgagcttgatgtttctcaaggttatatccaacttagtgcttattcgttcattctttcttgtcatttattgcatatttactgcatggaaagtaccttactccagattaaactggacatcaggcacaggccttctcctgaaagaatcagctaatggaaaatagataaacaaacaaacaaaaacaaaaccaatagactatgagagaaaagatttggggaagggtacagcttcctagaatagatggtttggagggacctggcctcccagagagggtggcctcacataagagcagtgaactgtggggagtttggtcccttcaggagactggaggatgatgtgggccaggtgtaataaaggcgaggaggccagatgaggccagatcatcaggacatttcctgggaaagcaggaacgagttagactgggaagctccaggtcagacttgaagtttgaaaagatggctctgggactggcctagagcccagaatgaaggcgcagagaggcagacagaagctgaaggtattcctgtgaaaactgaggagcatactgcttgtaggaaagagaactggagaggccgctttggaatacatagttcaggtctagcctcgggtatgtcctgagagctttcgaggagagaaatgtccactcgataggacacccattggctagaaggcccaccgggtactgttggaggcaccacactgccagagggtggccaggtcacacatgtttgcaagaagatacaacccaggaggttttcatccaaggagagtaggaaggttgagattcctaagggagaaagtgtgagttgaaagtgagagtgggctggaaatcagtctggcggttcctccgaaaattggacatagtactaccggaggatcccgcaatacctctcctgggcatatatccagaagatgtcccaaccggtaagaaggacacatgctccactatgttcatagcaaccttatttataatagccagaagttggaaagaacccagatgtccctcaacagaggaatggatacaaaaaatgtggtacatttacacaatggagtactactcagctattaaaaagaatgaattcacgaaattcctaggcaaatggttggacctggagggcatcatcctgagtgaggtagcccaatcacaaaagaactcaaatgaaatgtactcactgataagtggacattaacccagaaacttagtatagcgagatataaggtacaatatgtaaaacatatgaaactgaagaagaacgaagaccaaagtgtggacactttgctcattcttagaattggaaacaatcacccatggaaggagttacagagacaaagtttggagctgagacaaaaggatggtccatctagagactgccacatccagggatccatcccataattagcctccaagcgatgacaccattgcatacactagcaagcctttgttgcaaggacggtgatatagctgtcccttgtgagactaggccggggcctagcaaacacagaagtggatgctcacagtcaactattggatggatcacagggcccccaatggaggagctatagaaagtatccaaggagctaaagagatctgtaaccctatcagaggaacaacattatgaactaaccagtaccccagagctcttgactctagctgcctatgtatcaaaagatgacctagtcggccatcactggaaagagaggcccattggtcaggcaaacgttatatgccccagtacaggggaatgccagggccaaaaaatgggaatgggtgggtaggggagttgggggggggacttttgggatagcattggaaatgtaattgaagaaaatacgtaataaaaaaaagaaaaaaaaagaaagtgagagtgggtaggagcaactatgacatcttagaggatattacttttaagagggagttggaggagggatgctagccaggaaaggggaactcagaagggaaaaagaggacttcgaatcctgaaaagcaggatgaatattcctaatgggaaatgcctggggctaaaattattttggactttagatatatttatttcagaatatctacacatatatatcatatctataatatatatatatatatttatttatttatttattttctgcatgatatatatcaagatcttttggggatggagcccaagtcttaaggcacaattaatttgtcatcagtagataccttatgcctacagtctgaaggagattttgtacaacatgaggacccacatgcacatcttggctcttgggatctggaggccactggtgacctttagtaagtttattcatggagttgggagggcagacgccagctggcagcaggctgaggatgtaaaccacagtcagaagctggccagtgcagagagaatggtgaagaggggcccctggggacacaaggaaggtatgtcaaccagagcactagggtgaagtaacaggctcggcatagcagtgtggcttctgggaaaatcacatagagctacttccatactcctatgccttgtagaagttatagaaacactacaggcaacagtgacatacaagtatttgagaccaagtttcacgtgcagcccaggatggccctgaactcatagcattagcatctttctatctcagcctcctgaatgtagggattgtgggtgtgagtgactattcatgaattacactgtactttacaaaattataactgttctgatcatagaagaaagatagtcttataaaaaacaaccctggaaaatacaaacaagcattaggaaagaacagtactccttattcactggactagtgtcatggtctttagtgggtacttgatacagtcaagccagagatttactgcttctcccatgtgtgtatatggatgataaaagctaaaaatgatggacaataagagatgggcagtgataattaacagcagcatataccagtacccatggcaatataacctccctctcaaagtgtcttgttgttttatctttttttgcctaaaggaacagattaatgtttctcttatagatattcaggtttttaaataactacctttgtgctttggggccatgattaagtatactgcagcagtacaacagtcagtatgatgacacagacagctcccatggaaccaatgggcaggtagcacctactgggtggatatgcttgacaaagggtcatatgctatattctgatggggacagggggcagtagtttgagatttcattatctacttagaatgttgtataatttaaagtttataaacagtttatttttataatttttcattgaatattttcaaaatttattaactgaaaccacagaaaacatctagaaatagggggattgttgaccagcaacctcacggcctaaagataacacctgctagcgtttagtgaatttccttcatgtcttttccccttcttatacatttcacattgtagaatttatattgaaggtaaaatatttacccctcaaaattactctgattttcttctgtaaggctttatgtataatttactatgttattaaatgttctatagacataatatttttaaatgaaaatgattacaaattttattttatgtgcatgaatggtttgcttgcatatgcatccttagaggcctgaggagagccctgaatcctctggaacaggggttatggatggttgtaagctaccatgtggattctagaagaacctcgctcttatgttagaacatacatgctcttaactactgtgacatctctctagcccctagcaatagcactttaaaggctatgtagtattccacttcgtggtgaactgatgatatatggttcctttcaaaattcaatgcagaatttaccattagattcagcagttccacttttgggcttacacccaatggaattaaaagcaagaatcagcacagattgtggacattcatagtagcggacattcatagtagcatgatgcacgatatccaaaaggtaaaagcaaaccaaatgcaactgagggactgatgaagaggccacatgtatatgcatataatgtatatattatgcatgtgtgtagatagatagatagatagatagatagatagatagatagatagatagatagatagatagatagatagtcttacaaaggaatgcagtcctggcattcactatgacatggatgaaccttgaagatgtcatgttgagtggcataaaggagacagcgtgacaaaagctgtataatttcactcacatcttgtacctgcaatgagtgcaagtggaagatggctgccaggagctggcaggacaggagagagattggtttagtgagtacaggacctctcttttggaagatgaaaaagtcctggagatgggtgaggattatggttaatatatattgtacattatatgttatagttataatatacattaatatctttaatggtgcagcagtagtacttgaaagtgttcaaagctgtgaattttatgttctatatattgtaccacaattagaaccaaacctaaggactgaatcttttcaagactagtttacatgtagacagcaaaatctatactttcttttctctctttttagaaatatacctgaatatattttggcagtaatgtgtggttgactatacacagagtatttctgcacaccaccccccctgccaagcaccctgggcccctttcttgtccattgttttcttccccggtgtctgaaaaactactggactgcttttcccccctagacacagcgtttccatttaaatgaaatcagagcacagccttcagactaaggcatagtgcttctgatatgcgaccctgcttggtgcacacatcagtatgcattcctttctattgctttcagtgccctgttctgtggacaaccaagttgtggtacaattgattgatttaccagttttgtattgtttggattgggtgcaccctgggtagctataggtagagagagatgtgatgaataaactgcccattgctgactacaatggccggcgtgtgtatgactccataaagaacagctctgctgttttccaaatggctgtgctcttttgcatttccagcagaatatcggatttccagttgttcccctgtctcccattcttcaccatgttcagcattatcaggctttggatggttgtttggacttttggctcagcccttgaataggtgtagagtcaacactggtttgagttacagcttgtgtttccctgatgatttgaaatgtatctttcatgtgtgtctttgctttttatgtctttctgtattgaagtgacttctcactacatggggccagtttttaaaaattaattaatcaattaatttttttacactctatattttatcccccccataaccctctgactgttccacatcccatacatcctccccaaacccccagtctccacaaggatgccgccgccccccaccccacctgacctctaaactccctggggcctctattctcttgagggttaggtgcctcatctctgaataaacccagacccaggagtcctctactgtatgtgtgttgggggcctcatatcagctgctgtatgctgcttggttggtgttccagtatctgagagatcttgggggttcaggataattgagactgctggtccttctgcaggatcacccttttcctcagtttctttcagccttccctaattcaacaagagttgtcagctgtttctgtccattggttgggtgcaaatatctgtatctgattctttcagctgcatgttgggttttttggagggcagtcatgataggtccctttatgtgagcactccatagcctcggtaatagtgtcaggccttgagacctccccttgagctgcatcccactttgggcctgtcactgggccttcttttcctcaggcttctcttcatttccatccctgtaattctttcagacaggaacaattatgggtcagagttgtgactgtaggatgacaaccccatccctcacttgatgctctgtcttcctgctgtaggtgggctctataagttccctctccctactgtctggcattttatctaaggtcccttcctttgagttctgagagtctctcacctcctaggtctctggtgcattctggagggtccccccaaccttctatctcccaaggttgtctgtttgcattctttctgctggccctcagggcttcagtccttttccctcacccaaaactaaatcaggatcccttacccagctccccccatccaatccactttcctttccttcccaggtccctccttccctccccacttgtgatagctttcttctctctcccaagtgggagtgaggcatcctcacttgggcacttgacctttttgagttctgtggactgaatcttgggtattctgtacttttttttttctaatagccacttattaatgagtacttatcatgaatgtccttttgggtctgagttaccttgctcaagatgatattttctagttccatccatttgcctacaaaatttatcatgtccttgttcttaataactgaatactattccattgagtacataaaccacattttctgtatccattcttctgttgtgggacacctgggttgtttctagcttctggctatcacaaataaggccactatgaacataatggaacacatgcccctgtggcatggtggagcatctttttggtatattcccaagagtggtatagctggatcttcatgtagatctatttccaattttctgaggaacctccagactgatttccagagtggtaataccagttttcaatcccaccagcaatggaggagtgttcctctttctgcacatcctcaccagcatgtgttgtcatctgaggatttgattttagccattttgattgatgtaaggtggaatttcggggtcattttgatttacatttctctgatcactaaggactttgaacatttctttaggtgctctcagccattcgagattcctcagttgtgaattctcagttttagttctataccctatttttttgattgggtcgtttggctgtttggtgattaatttcttgagtttatatattttggatgttagccctctattggatgtggggttagtgaagattctttcccaatctgtaggttgctgatttgtcttattaactatgtcctttgccttacagaagcttttcagtttcatgaggtccacatggggccatttttaattatgttgttttctttagtggtaggtggcttttaggtcacttacaattattgatactgcttaaatatctataggtacatgtatgtaaagcattgtatataaatattttataaaaagcattttacctaaaattgtcttcaattttagagtgtatacttcaaataatttgaaactctcaaagaaagtagacaatttcagcatcctttcttaattgctgctcttgaacaggacttgggttcagttcccaacactcacatggtataactatctgtaacttcagttccctgggcatctgatgcctcttctgaccactgtggttgtcacacatccatatggtacatttacatacacggtacaagcaaaactttcatgtacataaaataaaaataaacaaataaatctttagagaaattataacgacacagaaacatgccacagctctccatctacagggtcacctgcagagcatatgaagtttagtattagggttgccagttacagtattttcattttttcataaaatattaattcggctcagcctggtttctttcatgctcagaggtcatgcctaatttgcatagctgggaaggtaaaaatactttcagagcagaagggagaaagctttgtcactagtttaaacttagacaccagtgtcaagacttctacaaggggcagcagtttctttgtctagactccatgattaatgaatgcactgtatcattagagcactctctcagaaaatgcccacaccacttagttgtgtgcttacctaacctgtggattttgctaacagctcagcactttatttatccacaatgaaaatacaattaaaaccacttacactgtttgtgctgatatgccannnnnnnnnnnnnnnnnnnncatgtgttgtcatctgaggatttgattttagccattttgattgatgtaaggtggaatttcggggtcattttgatttacatttctctgatcactaaggactttgaacatttctttaggtgctctcagccattcgagattcctcagttgtgaattctcagttttagttctataccctatttttttgattgggtcgtttggctgtttggtgattaatttcttgagtttatatattttggatgttagccctctattggatgtggggttagtgaagattctttcccaatctgtaggttgctgatttgtcttattaactatgtcctttgccttacagaagcttttcagtttcatgaggtccacatggggccatttttaattatgttgttttctttagtggtaggtggcttttaggtcacttacaattattgatactgcttaaatatctataggtacatgtatgtaaagcattgtatataaatattttataaaaagcattttacctaaaattgtcttcaattttagagtgtatacttcaaataatttgaaactctcaaagaaagtagacaatttcagcatcctttcttaagtgtgtattgttccatattttgccaagtgatggtaccagcttattaaccttccagtagtagcaataggatggacatgtcaattattaatttgaatttctttggctatggaaaatttcaaaggtaaccactaaacattctatatttattttgtgaagtttctatatcttgctcttttagatattatacacaaaagagagttggagagatatctcagtggtcaagaccaattgctgctcttgaacaggacttgggttcagttcccaacactcacatggtataactatctgtaactccagttccctgggcatctgatgcctcttctgaccactgtggttgtcacacatccatatggtacatttacatacatggtacaagcaaaactctcatgtacataaaataaaaataaacaaataaatctttagagaaattataacgacacagaaacatgccacagctctccatctacagggtcacctgcagagcatatgaagtttagtattagggttgccagttacagtattttcattttttcataaaatattaattcggctcagcctggtttctttcatgctcagaggtcacgcctaatttgcatagctgggaaggtaaaaatactttcagagcagaagggagaaagctttgtcactagtttaaacttagacaccagtgccaagacttctacaaggggcagcagtttctttgtctagagtccatgattaatgaatgcactgtatcattagagcactctctcagaaaatgcccacaccannnnnnnnnnnnnnnnnnnngctgctcttgacaggacttgggttcagttcccaacactcacatggtataactatctgtaacttcagttccctgggcatctgatgcctcttctgaccactgtggttgtcacacatccatatggtacatttacatacacggtacaagcaaaactttcatgtacataaaataaaaataaacaaataaatctttagagaaattataacgacacagaaacatgccacagctctccatctacagggtcacctgcagagcatatgaagtttagtattagggttgccagttacagtattttcattttttcataaaatattaattcggctcagcctggtttctttcatgctcagaggtcatgcctaatttgcatagctgggaaggtaaaaatactttcagagcagaagggagaaagctttgtcactagtttaaacttagacaccagtgtcaagacttctacaaggggcagcagtttctttgtctagactccatgattaatgaatgcactgtatcattagagcactctctcagaaaatgcccacaccacttagttgtgtgcttacctaacctgtggattttgctaacagctcagcactttatttatccacaatgaaaatacaattaaaaccacttacactgtttgtgctgatatgccaccatcaaatagacttgtgagcaagcggttcctgtatagagacacaattcttgttaattattaaaattgctgctatttttattatattccaaataggtggtatgggatgcgatatgactcagaactacttgaatgaattttggcttaatgactcttacaagtaaaaagcattttgttttctctgacaaaaggctctagttcacttgggctttacagacagttggtattttatagtaggtttatggccgcctcttcatcaaacctgtaattatgggcttggcttctctgcaaccatgagaaattttatctagttttctttttcccacatacctgtcattctggaagaaaaatggcacatacatgtcctgcagatcaagctcccacgcattgtaagcaaagccaggaatgaagaaacaacggacaaacacattttttttctaaaatttatggatctatgatttgttggaaagattcattgatttgagagggttttatgaattcaaatagattctttaagccaagtaattcccatctgggggaagaaaaaaagaacagaatatctcatggtattgtgagcaggtagacttcttggctttaagcatgtttcccctccaccttgaaagattccttgggtcagcatgtgaaatgggggtgatggcacctgtctggatgaaggtcatgttaaacaggaaactgcctgatggtcttcagctggcctttgttgtcatgtgtgcttgcctgacagtggtggcagagtcccccactgcccaggcaatattgaccttcttggggggaggaggggaggttgatgttttgagaagaggtctttctaccatttcttggagtcatgaatgaatatgtcttgagtctcttggctgttgaggaggaagaagcatcgtttcagtatctaaggaatccagccatttacaaaagcatcatgctctgtaactggcacattaactccaagccaaggcatgcttctgtgtttctctttgttgtcttctgtatctcatggctcttgtagatgtggctaaaccagttataccaacgttgattttggtttcttccccagatggtaatttccagacagaaaaaaaatagggcagttattgtgatgttattgtgatgggaacctgccttggaccgttctgagcagaaaggacatgtctcacagaactgccatgttacagaaagaccaggaaatatcagggaccctacaaactgcaagcacaaactcaattcctgcagagatctgtttgttctcttttcttctctcctcttcaggatcagttgctttctctctctcactgtaactagttttgctctcttagtgagttcatggctggctacagctctcaggcttttgttttatatggctttaattgctgcagaagtgatagctgagctctatcacccatgtctaaatatcccagggaaggaactgcttgttcctcaacctactgcggctagcaatattacatgagaatgttacagtttgaggaatttgggtaaagaaggtggttctggcaatgtggcagtagctacacttatggactctgtcatgttacatagctagtccctggcatctgactttggagttcactaacacatgctaacaaagccagtgttgaaaacttggctgccactgggattattattagccaagcttttgtccttggctgggtgctgctctgtgcctggttagccatctcacaaatgcttgtaccagatctggaggggaccctagtaacagaaagtgtgtaggtggaggatcagcagaactctcttgccaccactggaaagacaacccaaagaacatgtatttatgttagcgcgatcttatattgtgggatttcccctctgcagccgttctccttcactctcagctctctgaagcacagttctggtcacctctacatgatgttgcaatcactgggcaccacaaggctctgcagagaggcagctctgtaagcatcctagagagtggttgtcacatatgtgtacctctggggcatgtttctagctattagtcattatcttttgtagctaccaaaagcactagagttagattccaaatgtgtgcgtttgagtctcaatttgactgttgcagtggccttggtctaggcagtttctctctctgagcactaattctcagatgtaggaaatggggataatggctcccctatgggtgatgtcggtgtgaactgtgaagcaatgagacaactttctttctgtttttgtcatcctttctgggacctgcatgccaattaggatctctcttcttcctttggtattttcattttctagatctgagtgaatactttatcccccagaatacagaactcgggaccattagtaggactttgattcctatttcccttatggtaagttaggcaaatataaatattctttgtacttttctagcattggagggagaatgtctctttcataaggggaccagcttgtagcacctcacagaatgaatttaggacattttaaagggatttaagggtagtggggcattccttccccaaaacttaatggtccttcaaagttaaaatttagggctgggattatacaaacaatctctcatttctgattggctggactatgtgcttcttccccaagggccttgtgagaaacaggtgctactcgcctttagttagctatttagttagctatttctcctgctcatgaggattgtcagagttcttcctgttcagtggttctcttccagggtagacatttgacaatatctggagacattttgtcatggctggtggaaggtgggctgctaccggtagttagtgcctacaggctagggatgctgctaaatgtcctacagtgcaaaggtcagctttccagtaccaagagtgagctgtctctaaatgtcagcacatctgacatctgtgtgatgtgggtttgactgttgagctttcttttgatggacaaggaaaggaaggggtttatgccaggacttttctttttcatcaaaggtgtattttagtattacccactatgtttcttttgaaatttgaccagggaaccacattttctattccatgagtattttcccacttttgttgaagtcagaggcacttgttcctcttgtaaatggcatagtctttccttaatagaaagggcaagctgatcctgcctgccttcctattctcccaagaaattttaggtccccttggctgtaacttattgtctgtagaacagatcaagaaatagaaaaaatcccacaaagaacaaaaaaccaaagcagaaacagataccattctatggtgatagttttcgtgtgtgtgtgtgtttctctctctgtgtgtgtttctctgtgttttgtctttcatattacctatttcatttcagggacctaaatggggaagaagtttctttctgtaatgccatgtctcccgttcttggaacaccgtagtaaagactttcaatgcaaactattttttgattaggagaaacatcaagaggctcatggttatgttaaatcggcctctcacattgattcacctgccttttcagagcagtatccttagaaagaatttgtgtgtatgtgtgtggtgggggtcagtggaggtggttagggctactgtgggtaactttcactagagggtcatgaaatgaacttgtttgcaaccagcattgaacataagaaaggaagtattgaagagaaaaaaaatgcaagtctggcacacatagggtaaatattattttatatcaacctgtcattattgtaaaatacactccctgctttgctgtgatcaaaaggtctgaaaaagaaatcccagtatctattatacttttcctttgttctataacacaggtcagttgaagtcctgaagactattatttctttatagatcggtggcatgagttctatcagctggccatttctaaaccaattactgccgatgacaatagaaagcttgttaagcttgatctggatttatccatagcacgtctggagcccagtgcaagacatgaccacaggatagccctcctaccagagaagaattaattcaggtatagagaccaagtccaagggttaaagagaaagtgagatacctgcaggcaggaaggctcttttggatacaaagtggtgttgtgactagctgacgcaccactgacacatttaagactatcagccaaagctcttagaacattctgcaaggctccatccaaaccaacacattccagaggtcttccttgcctgtgatgtttttgagttctgcagattcgttctccactcttcctgccttacctggttctagccgcacctctctggttttaatatcttaaacatgatgatctcctgtcttcctcgctgctccttctatgttgaagagtttatccccttcttgtttcccctgccctactcataggtcccctttgacctttttacttactttaactgtatcttacactaagatacattaactgtatgttacactaagtgtgataaggatagctacctcctccatcttggcctctgtgggaatgccacctgtgtgctcagtaagcctccgttgactacagcctgggttttgggctttgagatagagctagccctagtggtatcaaaggactacagcatagccagtgggatgaggggagaaggaggctgcttacaggtactgggagttaggcagtcagatgattttctcatcctcagcttccttggttttcctctaatatattttggtcaagttgatttttttttcttttgaatagtttctatgtgaacaatttaataaacgaaacctcttttttctcctttttttttataacaataaaacgaaataaattctctagaaattgatttccaaatcaaatcacattcccataatgtatttaaaggaaatgaagagcataacattgcgtgtaattcaatggatttttgatggatcataatgatttgcatgtgtggttaaagtgcccttggtttggatctctgattgttatgtaagtgccacagacacatagacacatctcctgcgcatgcgtctagattttctgctccagagagactgtatcaatgttcatgagccttaagatggggcttttcttgggctccactgttcctattgctagagaaatgacctataggacagaagcagaaagacagctcctgccataaaggagtttggctctgaatcgagttataaggacccaacaacttatcattcattagagttcttgaagacatgtaaacaaagcatgcctgagtgttcaatgtaacaatccgacttggggactgagtagctgaatattcaatgttgaacagctgtctggatactgagcatagttgtaagctgcagaggctagtgccacttgactcaagtgacagaaccagaaggggcctgaggggcctgaggggcctgtctttgtgttcacctcatttaatagatgaggaaacagataattgcctttctcttccttacctgcaataccaacttatcagatgctttgcatgtgtcaggctgtagaagacactggttttaaaaattattatttgttttcttatttatttggctcttatctcccagtgaggagtctactttgtgtacactcttgcaggagtcttgttcaccttggaaacactaaaaggctatccaagtgcagctaggttgtgttcattgggtcatgctgcttaaaaagagactccattccttcatcttctgctgcttctggggctatagttctcctgttctttgggaccttcctccatcttcaaaactagcagcatggacagcaccttgcttcagttcttccattgccatcttgtccctagacaagtcttcctttgccattttcttagaagtaccttagcatttataaacattgtatattccagaacaatccctcctatcaggatatttaactctgagtaaaactgtcttatttgtagcagatgatattcatagcttccttagattaggacctggctatccctagtacaccaagatccctgctttctgaatttctcagactagttttctgatactcttctaattctgtgacttcctagtatgttctcaaaatatgttggacctgtttggtggggatgggataatcttaaactattttacctttaagatagctaaaatttatttctattgcttgtgaccaagaatcaatgtggtaaatcagtactatgcaaagaaatttacaagcattagtttttaaattccataaccttccttacaaggcctttctccatttgacatgtaagaacattgttgtctcggagtgacaattccgtaagtttgaaggcttgtgctaggattagagttgaaagttgatcagagagcatgtgcttcactcttttcctaaagcagaagtgtggaatgtgggccagaatatgaggtctgaaacattctgttttggttgagaaagcaagggaaagaagaggtggtccaagcaggagaaaggctggagagcaagaggcaaatgcaagacacaaattttaagggaaatgcatggtaaaaattggtgcctttatggaggtacagcactatgagaaatgaagagaaatgaaagaccaatgggtccatcgtggatcatagaatacgtctaaaaaaaacaatggacccaaaccatgggatatgtggactgaccacagtaataataccttggctcaactctgctggacatccaactttaattagatccctttctgaattctggtctccttataatgtgggctggctaaacacttgacacatttttgactaatattagtcaccctctcatgaacagcacacctttaaaaagtgatgcgcagaagcagacaggtgatttttagagggtgggtggcaagcctacgcctaatgttaaagacccctggcttctgtctattctccaaggagaacttgcagatttgctgagggttgggcaacaactaacagtaggagctctctacacagtaattgctggctcccaatgtgtcatgattagctggagtcattacttttgggcactgaatgagactgtaatgctcctgagcgtgtgtgtgtgtgtgtacacctatatacctacatacatatatggtggaacaagatgttcatttcatggtgaatgaaaagtaaaatagtaaagaggcccaggctctacaatcccctttgaagtcacaccatcagtagcctcagatctcccagtggctctacctaggatttctatgagacaggagccaaaccttttaacacacaggccttgagggaattccagatcaaaacttgagcaccacctgagtgtaatatgtagacttcgcaaatagaaatgtaggccgctcagttgtattagttacttctctgattactgtgactcagtcagtacctaacaagaagtaacttgaggaagcaggtttatttcaccttgtattttaagaaggaataaaggtcatcatggtggggaagatatggtggcagaaatgtaagacatatggtcacactacatctgtgttgaggaaatagacagaggatagaaagttggagtgggctatgaagcaccaagctctgccttctgtgagccacttcctccaatgatgctcaacctcctaaagtttttataccctccccaaatatgccactagctgggaaccaggtgttcaaacacatgaatctatgggggggggcacatttcacactcacaccccagcactgtttaatttaaatgccagattttagatagataatgaatatcccacacattattaaaaaaaaaactgcactaaacttacttagttgtactaaaaactatttcagttctttaagcaaaactcaaattccactgagcaacctatattttatctgacaattctaaacataagcccactgctgcggggtattttcagacatggaagtgaacagcagaacatgtctgtaaaaggagactattgccctggattgacaaggaggctaagaaaattccctgaggtcaaaaggaatagaacagtgaagatctgtggatggctgacctgggagatggctaagttctaattgtccagggcatctcttgcatccttgtctcctctgtccctccacagttgccacgactagaaagacttctgtcacatcatcaggatcagatccacctccactcatcacctcagcccctgacaactgaaagcaaaagtattagaggagaggctgagctgcaacagctagactgaagcaattaccagactggactgtgtgtacgacatgctgtgtatatttctggtcatctgccctctgctagggagggcaggaggaattgagtacacctctgtatagaactttccatcctttcaatgcttacaagggaaaagtacatggaaaaaatagagcctctgctcttgaagcgtatatacacagagctcttgggacagccgagagcttaggtttttattaactcagactgaacttatcctgggtggccttcttctgattttgtgatgtgtgtgtaaatattgcagcagatgctacctgccacgaaggcaatcttctagtcatggagacagacaggtacctagagaattctgatggtcctgaaagggatcagtggcaactcacttggtggtttatggcttgggatgaaaggaatcagactcactaatgtgttcagagacagaacatggtgactctgggcaacacactggaatagcattgctgagaagtgctaagtcaacctcacacagcatcagggcacaacaggactaggagagagaactggctttcttttaaccatttaactctttctaagcctggcttcctcacagaagtgaaatgtagacaactgtcttgttagatgaatttttaatgatttaatcatataacatttgaaaatgctgctagcaaatgataaatgttctgtatttgccaccccagcgctccctaaacatctctgtcatgagtccatattcttctatgtgactgcttccatggactgagtgtcaagagccatgtccttcctctcttcccgcattagacttgatagagctttgctgagctgcatatacatcaacacctggtttttcctggagaggaagcttctggcctttgtatcttcctctccttgtcactccctccctctatcattcctacggaggacatccttttctgtggggtcatagttgaggagtgtattacaaggtcctcatcagactttagatgttgggggataggttccttgcgtactcctagatgctccaacatacctatgactgaataatacccagctttcttggcttttctaatctttccatcaggaagtttgaggatacctgtggtctctatcagttattgatctgttcaaattcattcattttttgtcagcaaagatcaggttcaaaccatcaagcatctgtttaataactctgagaataggcctgaggatgtaggcgattctgatgtagactattgatggagatgggaacagggtttgctgggcccccagagcagggccccgttcctcaatccactttgccctctgtcaatcccattgtttctgatcttaatacatggtcaggggagccaagttatagctcctgcccccaaggactttgtgaacattagaaattaagaagcagccagtggctatgtatgttttaaaagctctgttgatcgtcttcctgcactggaagaaaaaaaaagaaatttctaaggaaccaaaaagctcgaggagcccgggctgtgtgagatcctgtttggttgttgggagtgcaagatggattcagtcaagagtacacttgatgatggggtagtgaccatgtcacatggctggctacgtgagtcccctgtgataaataacacattcctctgtctttcatgttcactttgttttcatggtacctttctgacatgaccttccctgcacgcttccccggcacctgcttctccattagcttttatctcttattttcctccttgcctgcatctccacattttttttaaactaggtctgttagcgtctcgttctcctgtcttccaactgcattttcactgtgtatccttgctctcttttaacaatgtcttctgcctctgcctccatgttccaaagcatacctgtcatacccaggcctggggaggaaattttcacttccagcagctctttgtgtgatgtgaaagaacatctgagtacctgggtctcctaggaaacagaactctagtttctgagcagagcagattccatacactatgtttgtgagacaccaggaaggagagtctggcacctgggcagcacaggaggctcagacttgagtccagcctttgttcaagagggatgccgaacaatgcacctgctttccctcagtctctatccctcgcatatctgtcaagtgtctttctctttcacttctttcttttctcttttgtctatttctgtcatagtttttcagttctattttctacatttgtctttgttctttttcctctttagaagttacgccatccccttcctgatggcctcctttaactttgtaagctaaaatgtggtgggggttgggatcaggaaagatgcaggacacttggaaagctcgcctaggacaagtgctttatgagagtaggagaggtttgcttattatttgagattgtatgagcacagaattacatgaaacttttcaatttatgtatgtggtgcgtatgtgtgtgtgtgtgtgtgtgtaagcatatgctttccccgtgcttgggtgtggaaatcagaagacaacttccatgtactggccctagggcaatgttctgctctctatttgagacaggccttgcacttttaggcatctacctcctttctgcctcccatctcatagttgctggtctcacaggtgtgctttaccatgcctggctttttaacgtgagttctggggattggcagtgcaagtattttatatactgagccatctcccccggtccaaagtataaaatcctaaagctgaaagcaatctccactacccattccaataacataatccagagtgagcatcctctctttgtcctaacatgagctgtgcagcacgaaatgcttgaatagtgctaacgttgaaagtgttcttctacagtgaggcagcttgtcaggggccaaagttgtgtgttcacagtcatctctgtgattatgtcatcttggattggtatcctcggtacctgtggatcttgcatctgtatcctagagccatgggacctttcttacggttctctttgcctacatttgaaatctttcagagaggttgcccaaagaatagttaaattggccattctttctactatgaagttttccggatgactcatttcccagtgcttctaaacagaggggctaatcttggagaggctgtaagggataaaaggtattatctcacaaaacaaagaataagctagcaaaatttaaatcagtgttattgatctttgtgtcagaaacaatgtcaattatgcactttatatgtgccagtaccttattattattattactattattattattattattattgcgatagtatctcactgagcaccctatgctggccttgaacttgcagttctcttggctcagccttataagtgtagtcgttagaggcatgcatccccatgactggcccagggcattctttatctttaacacagtgtaattttatatctaaaactaggccattgtacttccctagtttatagatgaaaggcacaacccaaccaaccaaaaaacaaaaaccaaacacctagagtttgagagatttgtatcaagtggatagttctttggaacaggacttaaactttgcttgtctaacacttcgttttctgcctcaccactcacaaatccatatgtgcctttgcccccaccatatctactttgtccataggttctatgcaatgcattgtctccttaacatgtgctatacacagtctaatagtagtcttgtcgatgtgtagatgtgagtacgtgtgtgtttgtgggtgtgactatagaaggtggaaaaatgaaagcacagaaagccagtccaggtcaaagtctggtttggaggcagttagaaaacatgttaataatgtataatgaccacggacatagctcccagtcatgaatgtcagtataatttattaatttggtaagaattctgagcgtcaaggaagaggagagtaagttacttcttcactgaagttaatccagaaaaattccctaaagagaacaggagacaggaatatgtgacttggaaatagaaagcataagggtctggtagcaggaaaggaaggggttgagaagagagtgagggaccagatttggttcaggtgtgggtctttcgttggtgtccatgtgctctgctcatgatctgggactaggactcgagtatgatggtaacttttcctttgcaaagtaaaacccagatggctatatttaattccacttaacgccactggtgattcacttgggctcaggtgcgcccacatacagctggcactagctttgtgtactttccaggcagaggctgctatagtccaaactccccatgaaacaggaggggacagacaggctgtgataaccttgagtcttttgtgtctctctccacagcatcctggccactgcgggaacccacttcaacacccacgtggacctgcggaccctccgggctgtgcgtgtcctgaggcctttaaagctggtatcaggaatacctagtgagcacctactttcttctttctgattggctagtatcctcaattggatccaggttataaagcaatgtcaggtggaagagaaagagttcttcctggagggaaaccctgaacttgcaacaattaaacatagcactgtgcttttaaatttaacattttctcatatttaaataataatggaagataacaaaaaacaggaaaggaaaataaaagaaaagtttattcctattgtattacactgaaataaatgctaattggatgcatttttttcattcatttcccctatgcatccaaatataattttaattattacatatgtgcagtgttatctgctgcaataagtgtttcagtctcctaaggtgaaaaattctatgtattgtcagaggttacggtttgttaatcagtactgtgcttctctcccagtgggtggagggcgggatctgagagggagtaataggaaaggtcaactttgcccctgttttataggattgtacagcagcagggactttagactgagtatgaaacacagcctaatgaattgaatctgtcaaaggaatctatatgtcatcacagaggaaacagagggtgagaaggaaacataggagaagggacatagatgatggcagtcttcagtttgacttgtcttggttacttatctcagaattaatggtttggtttttgatggaagactaggagagggtaactgagcccatcttgtcagggggcagtgaacaaggtctgtgcttcactctctcctctctccctaggcctgcagatcgtgctgaagtctatcatgaaggccatggtgcctcttctgcagattggccttctgctcttctttgccatcctcatgtttgctatcattggcttggagttctacagtggcaagttgcatcgagcatgcttcatgaacaattcaggtaaggtcatgattttctgtcttctcttctcccagtgcttcttccctttagtcataagcataaattcacgacatttggagctttgctgaaaaagtatactctatcttcagccctaggattacagtcagaaacttcctagtctgtagcttttggaggtacaaccagcttaaagatatatctacttgaaagttacattacaaaacatgttgctttgtatatagttggaggggctcaaataggtggtctcagatcctctgtccatgatagagggcttttagaatgcatgccaaaagccgttatgaataaatagtctacagaatatatctttgattcaaagaccagtgggaccctggagaagagaatcagatgggtgtcctggttgagctacaaagagagcacccttttgtgctccatctcacattcctgagaggactgaaggagctgttagtttggcttatcagttatgccttgaaaattgtgggatacacaaaaccccaatttccaaatatttgtatttttttgttcattccaagctaagtagtgtacaataggatgaaagtcagagaggaggttaagagaaataaagaataagttaaagagtcctaaataaataccatgtttttatgaaaagaatctccaaatgatttttattttacctttagtttaaaataaagtaaaaaaaagaatgtgtgcctaaaacttcaaagagttaagaaaatatagcagccggttgcttacaactgtccccaaggagcccagggagaaccaaggttcatcccagttcccagggtttggaaaatgaatgagatttaccattacctcagtgtcttgtgtgtgagccagccctgtaaatttctgtagcagtgcagaccaaagtagagcttcatgcctgaagaagatagagagttctttaggagcattttgagttgcacatggatatgaactgaggggtgtagagagcccaaggcgggagagggtctgaggcaagatgggcaaacatctgtctacagtaggagaaatgcttacttatggctccctaggatcatttccatgtcatactaagcaccgcatggtttgtctcccactctccaaatacatctgcaggtattctagaggggtttgatcctcctcacccgtgtggtgtgcaaggctgcccggctggttatgaatgtaaggactggatcggccccaatgacgggatcacccagtttgacaacatcctttttgccgtgctgactgtcttccaatgcatcactatggaagggtggaccactgtgctgtacaatgtgagtgagctgatggatgtggtgtggaggatggcgtgggattctggtgtcgttttggtccctctggaacaggaaagactggggaaatgttgggattgtccggactcaactttagaacttagaagagcctaacaggtcactctcccacaccccaacccctttggatttttactgagtggaaatacgtaactgtcttattgcaattggtagattgtattcccttattctgtcaatgggtgaatgaacaagttaaatcagatcgccttgttgtggaaagttttggatttacaaggtaatggggcacagtgaggtgttccaataagtgtaaaggtctcagttactgtccccaaagggctcaccgtcagattggaaagctgttatagtggttttcaaccccagtggcccattagagtcagctgggagctttaaaaattatactgcctgggcttcactccaggccaattaagtaggaatgtctagaggtaaaggcctgtcattgacattttttaaagcttcctagctgattttaatatgcagccactgtcaagaactactgcattacatgcccagagaaagcatggttaattgtgagactcattaaaatgcttctctggaaatccaagttcctaggttcctgcccgggagattctgactttgggtagctgtgcataattggtgagctgcactttcagggaacccttggtgattcatgtggtcaggtttgtctgagttggtatatgagacaaagctgaccagccacctgacagagatgctagagattccagcacggaaacagaagttagacaaagtgactgtgcctcttctgccttccagaggctggttgtcataagtctcccaaggcatggtgtagagtccaagttcaatcatgagcactgggatgtgcatgggatgtgaggggggcagagtgagcagagcaactggggaagatgcttgggaaggtttatatcctctgtgcctttgccttcagtcatttggaggcatgatgcgacttatatatactccctttacctggctttaactcaagatgcttacctttttcttctgttcttctctctctctctcatcacatatgtacaaagctaattaagtaagtgcagtgtgacttacatagaaagcagcctttgagaggaaaatccatgtcttaggaagagattcaaccaaacccgatgcccagagaacaaggattatatgaagcctaaatgtgtaggtacttagcaactgactgagtattgcagtcagcccccttaggtcccaatatatggctgctaccagttgtggttgcaaaatattttatggcttgttaggatattgctggtaagtgattaggcctagtttggcagtacctataccaaacttctatagtcaattttatgtttgtcactataccctgactttacaggacaactacttctatagcatttgcactttattgggcattttaagtatcagataggtgatttaaagcaatgggaagttggatacagttatatgcaaatactgtactatgtatgggagtggagaaacctcagattttggaatctatggaaggtctggacacctatgttctacagatgccagggaatgactaaactagtctggatctattcccatacaggatgagtaaggtggaactgagaaatttagtaggcaagatttacaggctgttgtgctaacattcctgggttaggatagggtaggatagaggtttcccacaccaggtgatgctcagcaagccctggatactgtgattcaggaccccctggcgacactctggaattcttattagctatgggaggcagcagggaggaggaggcaaacatggtgagggcatagtcacttcctatctgagatgtcaaggttgtcttgaggcaatctcaccaagactagccaagggaccttaagaaattatcgtgctggccctgcagtggctggtgtcacttgtagagctttgaaagtgatgaacttcaattagatgtgtagactcacctaagtgatgtgataaatgcatggaaagcctacaaggagaagtgttgcatttgaggatctaagtgcgatctgccattcctccgaccagggatcagctgggactgagatgcgccagagtggagcagatgagctgctcatcactcccgcactggtcctcttggagatcattacttatttctacaactattgactttgtagatattctgtatcaagcactatgcagaaacactagcaagatggcactggggcggggaaggggtgcgatccctactggcatggttctctctttaaattcccatctctcctgttgtctgtcagttgtagcaatagagcctacacaaagcaactgtgatctagctcttgcccggagttttgctccatgaagcaagcagggagggaaagaggtcaatgacagatcctctgaaacctttcatcacagcagttcctagggccacagactcacacctctctctgaagtccaacctgttagtcattgaactgaagcctcctgctggccttgatggttggatccaggcatagaagaactggctgagcaataaggttgattcctccaaaatatctggctacaaataggcaaaaagaactcttgtgtactctgaaaaaaagcagtggcatggggcatggggccaggtatcactggcagaggtgacagtcctactgaggtgaatagctgcctcttgattcaggagaaatcaaataaaaatggcactcaattttcagtaagtggaacaaagacaaagtctgtattttttttttttagagagccatcaaaactggtcttagttgggcaaggacctaattgaagcaagacccaataggggctgtgcagaggaactgggtacaccttgctgacttaagcctcctgtcactgcagagatgtgctccatcagactgactctttggaccacaggaaatagggctggctatggtaaaatcctatcataaaggctctctatttgttgaaatttaactattcatctttgaaagaaaagaggattggggaaaggggagaaaataacagtggagatggtgtagacaaacagacctgccaatcctttctgtgtgtttgttctccctgacagctctattgtcagggttacatgcagacaagcacctagaatttgtttgtgtttttttgtttgtttgttttttaaatctttgaaaaccagtgatgttcttggggtttattgtggattattctgggaggtgcgtgagtgcggagttgcttaagagcatgggttactcaaggaagctatgccactgaaaatcacactccagcatggatgctacatacttgaagctccctggccaacttacagacagcatggtgggctagacagtgtcccctccctagcagttattaatgatcttagactctatgatgacaaaatttatatgtgcaaacatgatatttataaagcatggacttaagtatgaacaacaaatcaacttaatatcatgaatacaagtatgtatgtctggatattttatacaggatttactacctccagtaaaacacagacattaggatgtagacttcccttctgtattagtcagggttttgaccagaactgatgggatgaatatttatgaaggagtttattaggatggcttacaggctaatccaacaatggctgtttacccatgtaaagtgcaagaatccaatagttgtttagtccaccaggctgaatatctcagttggtcgttagtatactctggaatgccaaagaagtaggctttaatgtcagtgaagggatggatttgccagcaagagcttgggtaagcaggcaaagagcaaaccatttctttttctatgccctttattatataatctgcccccagaatgtatagatcttcctacctctaaaaatctggattaaaggtggccctttctgcatcagatgatttagttaagaaaaataccccacaagtatacccagctgcttgggttttagttaatttcatgtgtagccaagttgacaaccaagaagagctatcacatcttctgccacttcttgttctgtgatggcccagtccacctaactgatatgtttcatcaggcagagcatgaaaagaagagagctactctctaccattctattgtcccttctttttaatgatacaacaactatacaagactaattggccactcagacgagaaagagagtcttagttatgggtgttacatactccaaaagaaaaagaaaaagaaaaagaaaaagaaaaagaaaaagaaaaagaaaagaaaaagaaaaaaagaagctctcaggcatgaaggttcatcttgaccatttttcccctaaaatgttatcctagttttctctctattgctgttacaaacatcatgagaaaaatcatgtcacatagggaaaggatttatttgtctcatacttctaggtcacagtccattattgagaaaggttggcgtagtaagtaaactcaagcaggaacctaaagtagaagctacttgcaggcttacctacagacctatgctggggtagctttcctatatagcagagaaccatcttcccagggaatggtgctgcccattgtggacttggcacttatacagtaattaataatcaagacaacacccacagacatgcctacaggctaacctgatctaagcaatccttctattgagattcccatctcagatgactctgggaagtgtcaagatgatgactaaagccaaccaggacaaaagcaaaggtttttgttccctgtttgctgtacagacactttataggtgtctttggtgactttggtgacactctgccattgactacccttacattcgtttgtgtttggcttctctcatcattttataccataagggaattagtcagggttccattgccagggctacatggactttcctcaggcttactttagtctctaccaaaatttcaattctgcttggtcaaattccagctgtattcttggcttcccttcctcctgtggtagaaagaatacaaagcagttcaattctgctggctgcttctacctgtttggactacagctcccaaaggtctcctcaactcacaaactctccctggcacttagtaatttaattaattttatttaccccaaacctgatagttgttccttttcatggcagcaagtcctttccttgaacagtgcagttcacttagcaaatgtgtctttggcttaagtattaaacctttaatcctcttcatgaggactagatgtagccaagagaatcaactctttcctgattctgacccgagtttccactcacttttgttattcttgttttatgctgtctgctgattttattagctgttttcatgtttttagaacataatattctgattgccaagcttcccaggtccctatctgcaattatttgggtctctgctattaatgttcaggttttctgtctgcctgcctgttttacatgtctgtagctggtgttatttcttttctcacttattattgatgcagatgtggatgtagaaaatcctagagccttgctgctttcccagatgtatagtttgcctgtctctgcatggagtgctcccagccgctgttgtggaagatgtctttgaaggcttttggcaaaagaggcaacttagagtctgggtgcttcctgagagccaccttcactgctcagaaagcctttggtttatgcgggtggctctctttttatcctgccttctagctatacagttaatactagttaaattcgataacatgtgtttactttctgcctcattgagattttgctcaggtgtgtgatatgcaagcatgttgaaagaatcccaccgtatcccagcgctagtgaaaaaaaaataccattttctttttggagtaattctgttgttgtggtatctacagaagacaccacaggttgaaggatgagagcctaggggacgtgtctaatctttgcctcagtcatccatcctgtattgcttcctcccacatgctttgatgataggaggacatctgtcaaagctcgtttgacagatgagtggcaggagtcctgatcttctcacggagctagaataatgaggtaccccatctgatctagcagctgacctaggtaacatctggggggcacttctagctagtctcactcttgctctggaactgacagtttgtcttcacatctcccatctgccatctctacctctctgtttctgtgtaagagcctgccatccaggtgaagcctggattctgatacctgtgtgtgttcacctgtgactcatctgattaatggagagattgataagtggatcttgcgggcaagtctgccccctttcccatgaaggctacagggcaaggtgtgcttagcaaggagctataacttccccctcattactcccaagtacctggaagcacgtattttttcaagttctccaaggagagaaaagagattaggagatattgcttctagaactcacagtaaatatttttctctcttctgtctactctcataggtatttatagacacattaacttattaatttatttagtatttgttatatgccaggactattgtagatgttggggatatagcagagcccctacatttgtggaatttccatcttaaggacataagtttgggatagatagcaaacgtggaatatatcagatagagatagatgttgtggagaaaattttaagtggagaactggtaaaggttcacttttacatgaagctctcagcaggactattcagagaagatggcatctgagcaaggccttgaagctggtaaaggaatgagctaagtggttttctttcttggttttctatgtcccatgtagctgggataacattgcaaggacctagagatgtgccagttacatttacagaatagcacagaggctagcatattggagtacagcgagtgacaggtaaagccaggaggaggatgcggatcacatggacctggtgactattgcttttttttttcttttcacatcagtgggataaaaagcaatagggcaggggtggaggacagaagtgacacgacctaggttgcatctaaagatccagattgcttgctaagaacagactctaaaggagcaagtctggaagtaggaagacaagttaggacatcagtgaaatggtctaaggcagcatgacgggaactccacccagggaggcaacactgtaagagctaaatggtgggtggttctaggtgtgtagttggctagtttcaagaatgagagaaagcagaacactggagttatcacttggggtagttaatagtttgaataaagattaagaattgagtttgggcgagttaaactttccatggttatttgatgtggtagtatggtcatgacattgaataaatggctttggtgtggaagcttattcaggaaatatcctttgggacgttttcagtgtatggatggcagttgaagttatgagaccataaaggaagtgagtatagaatggaggccaggggagattctaggcctgagttccaaaggtaaagtgttggggaaaaagtcaccagcaaaagtgactgagaaggagcggtaagaaagtgggtgtcccgaggccaatggaataggatgctttgaggagaaggaaggagaggaggggaaagtcaagaagggaacacatcccccctgaagtgccaacatcacacaaagcagactctcttctgtattcctttgctaatagtttcttggagatttattcattatatctttaactcacattcgtattttctctttcaaaaatgctttcctcatttaagtcaaatgtttctagtgggtcaaataggatgctggtgggaaatgcgccatcttaaggcaggaacagttaagggactgtgaagaggttaaacgagaaggcctggcacagtggcagatgaagtgctcgaggaccatacaagttctcttccaattccttcttttgttcttggggaagtaggaaatgagatcatcagctgagggagggaggaggaagaaggaagatgttggagggttgcagagaagatagaagccagctttctaaatgtcggagtggtaaacggggtaggaaaatggtgttggttctgtgcagcactgaagaaccccttggtgtgagtggctatgaagtccacaggagaccagtgagcggcacagagtgctttcaggagcttagccacttcgcagctaacagtggtagataaaggtctggctttttccaaagcaattttgccccatgagctcactcagggagagagggctgggagagtgtttgtagcttggcagtggcatctgagctaggtaaagagaaaagagctagggggtagagtaaaaatggccctttatgaagcccagtgaaaatgtgcagggcaaattcagtctgtggagtaacctacctgttttattattttggaagtagcaagttggttttgaagctgagcgttctgattcatacgtggggggaggggaggtgtcttcaccctgctctcaggagagtgaatatatggtatactgcatgagtacactgaggtcatgactgtagtcaccctacacagcctctaagccagtgcttctcaacctgtgggtcgcaacccctttggttacctaagcccatcagaaaacacagatctttacaccattatttataacagtagcaaaatgacagttgcaaagtagcaaccattttatggttgggaggcaccacaacagagggaactgtgttaaagggtcacagcattaggaaagtggagagcccctgctaagcccttgatgactcaaccccagagagcctgaatcctactgtcactgaagtccaaatgttttcttgagaacatttagtgactgaaagccctcaggcccagctagctgtctcactagcactatgtgcctaaatctaatttcctcccccaattgattttttaaattaaattaacttatttttgagtgcaggggctggtgcatgtgtaaacatggatatggggtcagatgttgacactgggtgtcgtcctcagttgtcccctaacttcgttttgagacagggtctctcactatacacagagctcatgcatttagttggggtttccttctgtctctacctctccagtgctgacatgatagactcatgctgccacaccccgcttttacacttatgctgggtatcaaactccggttctcatgctcccacagcaagcatgttacagaatgaacaatctttccagcctctggatttagtttttaaattagcacacaaagtaacaggtttctttatggcatttccacacttaattaggttgtctaataccctctccccttctgtcctctcccctctactccctcccttccccttctcttctcttccctttcttttctttctccctccccttccctctgtcccctcctctcccccttccttttccatcctcccccttccccttttttcccctcacccttcctctctcctctcctctcttttcctctcttctcctctcttctccttttttctcctctcctctacttttctctatcttcaccttttctctaccatatggctcctataccactcctggacatatgcctaaaggactcataaagatatttacacatctatatttactcctgctctgttcacagaggcaaggagatagaatcagccgggatgtccatcaaaaaaaaaaaacccaaaaaacaaaaaaacaaaacaaaacaaaaaaaccaaatgaatggataataaaaatgtggtccatgcacacaatggaattttatccatctgtaaagaaaagaaaaatgacatcataaaacgtgtaggaaaacatgtaggtagaactgagaaatgtgctattaagtgagctagctcagacttagaaagacaaatgtgttctttctcatatatggctcctagcttcttatctttgtatgtgtgtgtttgtgtgtgtgtaagggcaagagctaagaaggtagagggacctatgagaggggaaacggtgaggctttaaggaagggacggagggagggagggaaagttagaaaacaatgcctgtgattttgaagttgaaggacagctactgggggggaggagggggctaggaggtggtgcagatgattttaactgttgtgtgaagcactgcgccagcctgtttctaggttagtcacatgtcctctttggaagtcctgctatgcaccctgctggaatcacggacctgtagcatcccattcttgggttccttgtatggaaaggaacaggttttcgccctcatatgtgtcacattcccattcatagctgtctctgccttgaaatcattcctacgctctgcagatccatcttgatttcttaataatttgtcaaactagggatgccatcatgtttgggatccgctccaaatgcaccgcttgcctcctgaaccggtgcctgcatttcacaccatgcaccaggctggtctcccagtcttttgtctgcacagggccattaggctggctatgggttgctttgcctgcttttagcccacttaatacacagtttaatttccgatccacgcctcgggtgcctgatgcgtcacacagcctcaggctatgatctctctgttcagagacaatactgagctttaggtgatctgtccctggggtttcggggacagaaattaactagaggtggcgagtggtgactcaacagccatttcaggtacttttcactgaatcaccctggagccaaatgcttccagaatcccagccaggcagggatggcaccgtgacaactcttggcccactgggaaagccaagaggtctctaatttttttttctcaattgatcattcactggggaaaaagaaaaaataagtattgagcaatgcttttcagggcccatcctactgtggcccatcttaaagtcatccaggaactacctctgcaattttcagtcactgggacctgccctgacctaatatgacatcatccccagaggtagaaggaaggagtccattttaataagctccctcaggattctaagattgtgccctgaagtttggagaaccgctgttccacatgactgtaattgccaagcactgggcaaagagacacagcctggagagtgggagagggctgaaggggagacactctgcctccagcctgtgcttcccaccaggtgggtttccatgactccgtgcattgtccactgtctgtctgttatacagtgattgacaaagagtggcctctgattttaatttagggacttgagtcccaatgggaaggcaagtcatgtgaagggaaatacacaaatccatataaccataagacaaaggaaatatcacaagtggctgggagagagatgctcagggctctctgggaggaccaatgggtgtggctgacctaaaaggagcttctgaaaagcctgtatagacttggcctatttagtgtgagggccagggaacaaggagatctagtgatagtgagttgtactgtatggcaaaggtgacagagctcttggtgttccatgggggaacattgtttttctaagaggcactgggatgctagtttatattcttaatgttttaaagggataacttgaaaactgatatcacgaggttggtagttgtgtgtggaaggtctggaagtactaactttctttcacctaccatctccttgatttctctgtaattcttgtatactgacaacagtatgtggagtttgctggtttgagcctcctcaattttacatgttacagctagacatcagttttgttctcagttccagccagtgtaccttgttttccccctgatttcatttcagcctctttcaaagaggaggtagggttagactggaacgtcttttttctcaggttctaaggattcccccttagctgctggagaagagttttgaagggttcctgagaacctctcaccgttgtctagccaccaaataaaacgggatgttctacactcaaagaggcagggaactgaattaactccaaggaaaggaattttatgaaaaagaccattgagaacagttcagctgaacatcagtataggaatatgtctgatgctctgggaatgcacagtagtcaagagaaagaaaagaagccataattataaacatggccagagaggacctagaaggccttctatctttcctccccttcagctgtacttgggttctgtttactttgaaatgaaagactgaggcaggaacctttcatacttgtgttaagtggtcttcatcagccagaacagaccagactaatctccacagcctctggggttggagagaagatggtttatttttctgtcccctgtggcactatccttatctctttgtttcccttcctcccccttcctgccccccccccccaattatcaccaagatactggtccttgctctagaccagggacttacccactgagatccatgagcaatcttgattagcatctttaaaattccttttaaatcattttagtgtgtattaattgtacaaagaagtgatttccatcatggtgtttcctacacgtacataatacattttcatattttgtctttgttttgaatttttttcttcttgagaacgtcacacgagtaaacagaagaatatgatcatatatggttcttacttcacctcttcagcccctcctcatgtcccttttagggtatgaaaatcttatcagtagccacatccccagaaaagaatgatgttccctctcctagaaagcatcagttgccaacctctcctagagctgccaaaagctcttaagtaagaagtggagcctggatatcatctaccctctctgtgccagaattttgtctggcttgttgtcataagggtcttgtttaggtaatcacagttgctgggaggttgtgagtgtgatagccatgtcgaatccagaagatagcatttcaaggtatgtctccctagcctttgactctcaccttctttctggctccctttccaagacattccctgagccttggtggaggggaaacaggactagcaggctttctattggagtcttgtttaggaatcagtgctcagtcttttgtttgtagtactctgaccagttgtaaggccccctattgacacatccttgaatcaaggcccattgatcatacgttctaccaaaaaattctacagggaaggagaaaaggacatcctattttaggggttatatctcaggcttcctgaattctaaaatctttgactatggacaacaacactgtagaactgaggaaatgtaaaattaaggaaaaaaaatctaatttgaaaagttgcacatgatctgtgtgcttgagaccacatgtcacatttagaggccacctgtggtgagctggcttaatttgcttttggttcagactatggagtaaaagctgcctcggccatcagctctgcatccctttgaactttgtggaaatgtgctgttgattcagaaagcttttgatctgtattagctcatcgttcttaaaaaacaaaacaaaacaaaaaaccaaacttaaacttgtgtgcttacctaaagaggtgtgagtgatcccaccattaatattctacatgattcaagattttatttcaatactgtgaagcaaaataaaatacaggaatcaagagggtgccaaggctgattcaagactgcagtgttttttttctgtcacccctgcttctagttttcatcttcccataaacaacctccattttttaaagtgatattaaacaaatatctacacgatgggtccattttgtgaaatgcatataatgcatttatccctaagatgttcacctttgtgagttttatgtattgctattatgacgatgatcttgttagaaatgatgtccgatactaaaggtggaatgacagatgggccctggtcccacctccgctcccttatgacttgggaggctgctaaaagttgtgcttttgtctccttatctatgaagtgagaatcatcttgatcctccccgaatagagttgtgtgatgattaagtgagataatatggatattgctttttacacatcctgactcataataacaccatagcctctgatattattaaatatttttttaaaaacaccatgtagagtagacaagcaaacatttctttccacagcctacttttcacatttcctgatcctcacaggctcttcctgtctctgagtcttgccacttcataccttccatttgcattacctgccagccttgcttcccctttctttgcattcctgagatgctggatttccttgcaaagctctggggtacttcctccactgagtgtttactggctgtgggttgggaggtcagaaagagatctttcctctaagctcttctctcagatctgaaggccagtggcctgcatctggtactttcctggaactgccatatttactcgtcatcttttaggtatctgtgtccccctccctgtgtaaatgctctgccttccagcatcagcacctcaccctaggcatggcttaatggtaagcatccactgatgagcactgtagactcatccaaggcatacctgtgcagcctggctctgtgttcagacaggtcagccccaccaggatggagatgcatcagcactccactgctctctgtcctcacaccagctcagctccctcctgtggctggtaaaagggaaaaaaatatccggagaaaagtaggggaaaggtaatttgttttagtgtttacagagggcttgtgtataattagcagttcatttctgtaacacagttggcctccttggctcggaacctggctcttaaatactcttaaagggatctatacctaggaaggaaaaaagagggtgccctaggcctggtaatgacatgtgatcaaaagcaacccttcagttgaatatttctcgtttctcccctacccttccttactctcccattctctccatgcacccccttcccttctcattccctcctcctcctccccttccccttccccttctcttcttcctcttccatactcttcctcttgacttggaccatttaccagttccattttcacatatgctcacattggcttgggatgctgtggacacgattgctgcttgctgcctgccttcctgtcatgagccccatgaagaccagccaaatattcactctctctttctaagtatcaaatagatgaatacacaaatgtgcacctgtcttttcattatactatgggggcaatatgcctgctgttctaccctagagcaattttacggcaattatgtgagatataccatacaaatgtacttaccaaaacgaattcatctatcaatatgtgaatgctctttgcatgactttttactcatgtgccaggcacaagctggtttgctgagtgagtagattttttttttcttttctctaccttattcaagaaaggcatttcgttagatcaggggcaaacacaacaaaccctcttcctattttctgttccccactgtgttggccaagtctctggtccgtgtctgaagtgctctcttgccctgggcttctgctggggaatacagtttgttcctcatattatccacgtatggaaaacaacaacaacagcaacaacaacaacccacttctggtgtaaaaatggctccagaatgcatgctagagtcttcactagttcttgcaacttgcatgtgctctgagtagctgggggcacagtgaccctgcagctgcttccggtctccagtgctttaggactctttcctgtcaatagctgctgaggcagatttgggttcccgtgcagcagtgtccctggggagctctgttgagcctgtgatgagatctttacaagcctgacagactgagaaaagagtggctacatagatgttcacaaaattacatttgttcaacatgaagttgaattaaagaaattcttttgacattgaaatcatgttttgacatgataaaaaccaaaaaaaaaagaaaaaaagaaaaacaaacaaacaaacaaaacaaaacaaaaaaccaatctaacctgtggtcatcccagtttcttccaattttttaacaattctttgatctttgaaaactaaaaataaatattttgctaacacaaattatgttcctatggtaaatcaatatgatctatttatgtaattataccaatataaataattaacttgtaaatgaatatagctattagctgcttgatacccacggtttcttttctgttctaatgacactgaaggttttgtgtgtatgtgtgtgtgtgtgtgtgtgtgtgtgttttgaggtctaatagtcacttctatgacttgtcaccaaatgagtatcttagggaactgatatggctgagctgactggtgaattcattaaggaatgtggtaatgttaggcattgagctacactgagcacatccatgttggctcccaggttttatttctttaccatttctgtctcctttgatgactttaggcaagccatttgacctgtaatagtcattttcctctactgtgagtttgactatagattcagtacttagttctcaaagtggctttcagtaactagataaaaatatggaggagctctttgtgaaccagataatgctccatggatgtaagctgtcatgaaaataacataagattataagcatacgtgttaatctctattattgagatttataaagaagatgttccacacattatcttctaacatgttttgacagatatggtcagagaggtcccttggaaataaaggtaaaatgtatacccagaatattattagtatcattctcctttctttgtgtacaaaaccttaaaatatcatgaccttttttgatcatttcattgataatataaaacaaagctgcaatagaatagttttataaaaaacacgtttctcagtgattagagacaaaagtaagtgtagtagcttgggttccttcccatgggactccatgtacatctgaatgatcatggtatgtaccccacatgcctttgagggtatctcttctatcatcagagctatcatcagcttccttaacaatatggaagcaaaggcagaattaaaagggcatgaggcatgctacacctcttgtgtgcacaggttcaagacattgatagtacatgtcccccgaaaatgaaccatgctggaagagtcagttaggttgctgtatctgtcgacagcttccctttccctttctctgtgtttccattctggcttctgtcatcttctttcctctctagttgacaggctggttgtccttatcagatggctttgggatggtaggacagccccctaggagtgtgctccagggtcaagctatgaaggaacagcagcaagatatccatgattagatcactgtgatactctctttgcggagagtttttatggttcccagcacttcaaatcccattgcctaaatgtcagtagtctggtgacacagcctatagcccttgctattctatagagatgttactatgagcaccccaacccccattgcatcatatgtccaggaaaggttgccacagagcttaattgctggtgtttatttagtctacgtgtgcttgagtgtgacagagtgagagaggggtacagacctgtcttttgtacccatgttatttattgcatttttgtcttacgacttccatttagagctaacgaagctgcaaagtaggttatttaagctgaatctcgggtgggtgctgttagcaagtggagaagtgggtggcaaagagagagaaagatgggagaccgagctgaagagattcacacagtgtggtgctttgtcctgcagtactgcaggtcataggcatgctgcagcttgcagctatgagcctctttgtccaagggtaaagactttgtctcaggcacttggaaagaagcctcctgcaggcaggtacacacacgcacacgcacacgcacacgcacacacacacacacacacatacacacacacacatacatacacacacacatacacacacacacacacacacacacatacacacacacatacacacacatacacacacacacacacacacacacacacacacacacacacactagtgtagcactgaaaatcatatgcaacctgaagtgagtgggttttttctcttttctgggaaggaggctccttatttaattaacttcctgcctttcactgcagcatgcaccactacctgttctgatcccatgtgcctgataaagggcagatggaagaggaggaagaatgatgcctttaggtcacagcattgtcacctgtccaaatgccatttcaagagtcttctcttgaaggagtggtcgtcatctcctgcacacagctcaatgtgtgtttgtgcagatgtgcatgtgtacctgtctgtgctcagattctctgtgtgcgtgtgcatgtgggtagcccgttgtcctttctgaaggttttagttgatcgaaaccattcatcagtcgtcttttggttgggtttaatgaagggtctttcatgagcaccagaagtcctgtataggattcccaatacagagctagatgaagtagaaagggagaggataacaaccgaggaagtagaagctcccgattttgtatatgctgggacagtgaatcagtgacatgtgtctgaggttgcgctgtccttggggtagggacctaagtcctcaagaccaaagaaggaggaagactcaggaagaatgacaagtaagaatatagggatagagggccaagggcaggcaggactcctgtggctctctctactcttgtaacaaaggagcagcctggggttgtaaatcatctacgtctcatactcctccttaattaaattcctgttgtaattgggaagagtttccatattctctacagctatggccacctatctctttcattagacccacccagtatttatagcctccttgagatttggaccctctgtggctttacagttgggggtctatacagtagtgaatgggcagttggttttagaggagacaagggagtatgctgtgttttgccaatggtattttgttttccagggctgcagttgtgactctctcagtgggcgaacattccgtctccatcagatatctatgggcctcttttatctcctttcttctcttctcccaggacaaaacatgtacctgagatctctataaacatcagactagaaaaaaatatgagcgataaaagacagaaaaactagagacaggtatgcctaatctattcatctgatacctactgtgtgtatatagtcttgagggtgactttgattagtctttattttataaaccaagtgatccaggtctgttcaaggttttatagctactcagatggagagttttgccttgttgaactagatagccccgtttctttcaattcctccctgcttccatgagttagaacagaattggaaaaagtaggtgatttgaagaggtcagattaatttatgtaccacataccagagtgcttactttgtgactcctgggcctattagctatgggaaggcagaagctcctggtcttgaggagagaagcatgacttgtgttctgtgcctgtcttatcttagtactttgttgcaggtctttgagcatatggaccaagcacaatttgtgttctgtggctgtcttagtactgtgttgaaggcctttaagcatatggaccaagtactgcagggcataaagacagccatgaaatatctttctggagtagtcaggagagactttatggagaaaccttttctaccttcaaagaggtagaaagatcctggttagacagcaatattgttgaagtgttgttggtgaagtgcccaggttatttctaagagacacaagcttatagtagatttcctggttctatggctcttagagtctttctgccccctcttccaccatttttctttgaaccttgggtataggagttatactaaaaatatccattatggtcaggcacccctttgtagttgtactctgcatgttgaccagatttggttttctgtaacagtctctgcttgttgcaaagcaaagtttctttggtgagagttggaagctatacctatctatgggtataagggtaagtatttagaatgtatctgtgaattacagtttactagagtggtaataataagttctcctcttaagatttatgaacacattggtcttgggtagttggctaggtttccagttccaggtatgttttcttacttgctgagaggctaagtcaatgagacagctgttggttaccaccaagacatgagtgccaccattgcacttttagggatagcttgtcatgctggtcattgtagttcatagtcttcacaactgagtaggattattggttgcttctttcctttggtagcttgcatagcacctctgttactatgagaacaagtcctgtgggaggagattttcagttagcttagatcctctgaatcccatgtgtcagaagtgcatggtgtcttcagcggtaggaacttaccttcagtctctgggaggcaataaaaacattgaatgctaatgttaaaggagaaaataaagtcctagagaaagacctataggtaactggagggaggacctctcagatggaggaccaacaatgcaggaacctcaagtagttgtctgagtagtttttggaatggctagaaagacaaggaggctggaggactccaagagacaaaaggagagagggagacagtgggttagagaagagagagctagctcagaccattgtgaggagtttgcatttttgtctttagtgttgaggggagagcagttataaaatccatcatgtgctgaagcttcactctactcgctacatggagagtgcctttggtgaggcacagaaagaagaagaaggcagtgggagaagtaatggaatccgaatggttgtgtaggtggaagagctaagcagatctttacataaggtctgtatagaaggtggtactggggctagagagttggctcaatagttaagagcactgaccactcttccagaggtcctgagttcaattcccagcaaacacatggtggctcacaaccatctgcaatggaatctcatgccctcttctggtgggtctgaagacagctacagtgcactcatgtacataaaataaatagatcttaaaagaagaagtaggaagaggaggagggagaggaggaggtcctggcagctttctattgggtggaaggtgagatagaagagaagggaggatttaaagctcctcagctacattaacatagcacaacaacggtgtctttctctgaagtggaggaactcaaagacaggactgcttgcaggtcaaggctaagaatttgtttggagagaaagttagaaatgcccagtaaccccttacagtcatttgattaaggtacaggagggatatgtgggtctgaggctgagttagaacttgaagtagacatttgagactattcagtttatttatgacagtagagccatgagctcagctgggattctttgaagagaaggtatagataaattgaggaccaagaggctgagctctgatagctacagcattttgttgacaccgttagcaggcctcttagcagaccaggctctaggatcacttttgtggacatgacagagactgatttatcagacattgagccaggtacaggtttgtaacaaagtggtgtggagggagagtctaagtcaatctggtcttggttctttcgttctccataaaattacatagcctctcaaagtgatttttgttggtttgtatgtgtatccatgtgtgtttgtacatacttgcttgtatgtgtacatgcatgtagaactacattgaatatctccctcaatcactctttgacttttatttgaggtgagatctcactatgtattcctggtagcttgaactctctatgtagaccaggctaaccttgaactggtagactttcacctgcttctgtctcttgagcactgagattaaaattatataccgccgtgtctggctcaccaacatatttttcaagacagatgagattcattcagagttctctgggcctgctagatcgctggccagcaagccccagggatcttcctgtctatgcctcctcagcactgggatcaagctgatggtttttaaagctggattcctttcctgctctgagtcattgactctttattacacagtactgagagtatctgcatcatgtatccactcaccactgttcagatctgtaactcactattagacctgtagatatttagttttaagatgacaatgttgtcatctgtttttgtcctgcaccttgcccattaggaatttcttttggcccttccttgagatttacctggaaatcccacacctgttctgatcttcagtggtctaggctaccacagtctctttcctgagttaacgcagtatctccctgattgcacaccacctcacttcagagtgtccccttcgggtgcatgtcagagcatgctacttctgtcccctgaaccctttgatggaggcttgtctggatgcgcaaaagacaacactctgaaagtatctacaggttcctaaaaaccttnnnnnnnnnnnnnnnnnnnnaaatgcccagtaaccccttacagtcatttgattaaggtacaggagggatatgtgggtctgaggctgagttagaacttgaagtagacatttgagactattcagtttatttatgacagtagagccatgagctcagctgggattctttgaagagaaggtatagataaattgaggaccaagaggctgagctctgatagctacagcattttgttgacaccgttagcaggcctcttagcagaccaggctctaggatcacttttgtggacatgacagagactgatttatcagacattgagccaggtacaggtttgtaacaaagtggtgtggagggagagtctaagtcaatctggtcttggttctttcgttctccataaaattacatagcctctcaaagtgatttttgttggtttgtatgtgtatccatgtgtgtttgtacatacttgcttgtatgtgtacatgcatgtagaactacattgaatatctccctcaatcactctttgacttttatttgaggtgagatctcactatgtattcctggtagcttgaactctctatgtagaccaggctaaccttgaactggtagactttcacctgcttctgtctcttgagcactgagattaaaattatatactgccgtgtctggttcaccaacatatttttcaagaacagatgagattcattccagcagttctctgggcctgctagatcgctggccagcaagccccaggggatcttcctgtctatgcctcctcagcactgggatcaagctgatggtttttaaagctggattctttttacctttataactattctgttcattcaccaaatattgattggaggcctggctgtactaggcattgttcctatgcatttcgtgcttttccaaacccatgactcctcctaattcctttcctgctctgagtcattgactctttattacacagtactgagagtatctgcatcatgtatccactcaccactgttcagatctgtaactcactattagacctgtagatatttagttttaagatgacaatgttgtcatctgtttttgtcctgcaccttgcccattaggaatttcttttggcccttccttgagacttacctggaaatcccacacctgttctgatcttcagtggtctaggccaccacagtctctttcctgagttaacacagtatctccctgattgcacaccacctcacttcagagtgtcccgaagatcctggtgcatgtcagagcatgctacttctgtcccctgaaccctttgatggaggcttgtctggatgcgcaaaagacaacactcttgaaagtatctacaggctcctaaaaaccttctagcccatcctctctcattttgttcatctgctctaggcacagtggcctcgttactatagaagacagtaggatttctcctgccctttgaacattgctgggatgtttttccctactatggctagctcactttctccctttgagtcttaaacttgaagtcttccctaaccttactgtatataaagtggatctctttctgtatactttatttttctccagaaagcttaactctatgacagtatatgctttctcctttgattttctttataggctaagccatcccactaactgtaagccttttgaggacagggcttttgtctcatgtactgggcaagtggtttccgttagaaatatcaaggtaattgtttagtaaacatttgctgcatagactaatgacagaacaggaattggtgggctctgttagttattgttatctttgcaccaggctgtctggtgatcagcgaggtacatttatgcaatattgagatgccattagggactggatctgcctctcagagcagtgtttcaattctaggaagccatctagattgggcctacacattaggtgtctttagtatcattaggcaaactgatcaccttggatttggggttctatgactccacaatgggctcttttgaggccatgaacaaaatcaacaaccatttgttaaacatccacagttaaagcatgaaattaacctccttagcagggggatgcgtgtcgggatcaggattctcaagggagccctcctgaggcttcatttaggcttagccctggtgctgtggcaagcctcaaacacttgtacatacggtttgaatctaagcgaacttaaaaccaggaagaaacacttacaagcctcaagaagatagcgaggtctcacttagctccttgggggtgtttagtattctggaaagagcaggttgagggattccagcaaatgcttactgcatccatttgagatgcaaggcgctgttctgataggctacgggcacattttctcaacaacttagggaactggatccttgctttcccacttcacagctgagaaaagaaaggcgtttgctctcagagtctgtgcccttctttattgtgctacaattatctcaaaatgagtgtcattaaaagggctttaggggaagtagaaaagttatttaatatgcttatgtgttacacttggatttgtggagagtcgctgcgcatgaagacaggatttttttttttaagtaagccctgcatgtgcaagcactgcaattagtatttccaggagagaccagtctcccactgctgtgcttccttactggcttcattcgtgacactttcctcataagagagaatgctaaagcaggcctgtctttttgatggagatcccaagggttgtgggagtggtcaggagctatttagcacttctcacctctgatcctctgtactgaagaattctggattgcccaggaatgagtttggttatagaggagccagcttcctgctatctccctcttcttgctattgcctgtgtcctgtgtcctgtgtcatgtgtcttgtgtcctgtgtcctgtgtccctgtgtcctgcaatgtatctggctcaccagcaggtaccagggggaggggaggtcagcttttgcttcagcttagtagcagaagagaaacaatgtggaggtggaactgggtgatcgccctcccactaactgccagtaactctctgctctcctctgaggaggaaagagttgggcagttttctctcctgaaaacactcttgaagaaaggtgtcaagcttggatcaggatgtctggactcatcctgacttaaaaggaaggcccttatgacttccatgaatgaggctcaattgtctactttcaagttcccttgtattctggggccttgtgccaccctctggaaagtctacagacagtgttcttcatggaaaggctcctgttcagaatcatgtagaaatggggccggggttagctgtgtgttttcttggtatcagattggccactaagaagtaggaggaggcggtgtggttggaccagtccctgggggaagtgtctacatcaggcctcaattctctgcagagtgccaggccttactctcatgtaattaggcttttaatgccactttctattgacaagggtgagcagctgccaagtcacttcagatgacattgggttgcctgtcatgattcctgtgggactgcggaagaactgtgcttcctcaataccttgccctacttgaacctgtgccctgatctggttccgcacctcctttggaggaggccattcagagcttctctggtctcttcaggcccgagtctgatccagagatactgcccacatcttggcatagagtttttcagtggaactcagaatgagcctaactcctgaccgagtctaatttgtagaacaaagggagagcagtgaccctacattttcctcctgcttgtcattctgagagtggaggaggaatgggaacttatttgtccatcttccagagagtcaggcactgtagctgatcacttcccctctgtgaacagagataagaaaagcaggccagacatggagctaggaaggaaaagaagagaaaacaaagtaatttccagtgtgcatgcatgccccaaacattcatgcgtttgactatggaggaagcagggagaaataaatgggagtcagcggggagggggagagtgctgagacaaggtgagggctggagagaaggagacatgctccccaaagaggcaaagaaatgacatagaggcaggaaaagaagtggggccggaaagagaagcgctttctgggctcaatctttcaggagtttctactgtgagtcccatccaggcttgaggctgagtggaatatgtggaaatctcaaatccaagagcactacacgcatgcactgtattttctttatgtccctgggcctgggataataacaaccaagagagagacagtaaggaagagaaaagggggtggtggtgatggaggaggtatgaaactttaatcaatgcccagtgctcttaagagttcgggagctgcacagattttattatctatgtggctatttctgtcacctcccagcaatcctcagagcagcaccaggtctggaagatgatgcttgattccatcaccttgggcttccttggtggggaggaggcagtgtacagccatgcaacgacaggatagggtgtgctcttcagcacacagaggggtttggctttcactggagttcatcagagggagatttttgggtctacattggtgtgtttgaatataagcttgagctcatgtaaagatttaaagctccgcctttggctggggacgtagcttgacgatagaatgcttgcgcagtgtaaatgagactccagcttctgttccaagaccaccaatgggctgtgctttacctcttagcaactcccccccacccagcgctctaaagcccacagctgtggggtcatgacaggacaccttctgtctgtcttgatgcttcctcccctctggggctctcctctctcctcacagactttctcccaagggattcctgttgacagtcccttgactattcagtctatacacggatgactcagatttacacttctcacccagaacacttctgagctcccaatttatctgtctaattagctcctcttggcatctgctgtggtatttgtgtttggcctttgtattcacgtgttgggaattgaatccctaaagtcagaggttaatgatacttggggaaagaccaactgggagctgactccattgtgagggcactgtcctaatgagtggactttggattagtgagttatctcaggagtggctttaaaacaaaggcagtaccctttggctcacctgctccatcttaccatgtaacctatgttctaccatgacccagcatgaagacccttaccagatgctgtgcagaagctgatgtcagatttcccaacccccagaacagtgagccatatagataagactgtattcattattttaaaaaaaatgaatttatggtctttaattatatacagaaaacattcaagccagtaccttctaagaacctctctattacgcagttggctggtttgaacccccaagctctcattgtctttcttgggttccaattttcctggtattccactacctaacaccttccttcttccttcctatccagtcttctcacagtatttgcttcccattgtcttagttaaggtttttgttgctgtgaaaagacactatgaccaaggtaactcttataaaggacatttaatttgggctggcctacatataggttcagaggtttagtccattatcatcaaggcaggtaacacggtagtatgcaggcaggtatgacactggaggaggtgagagttctacatcttcatccaaaggaagccaagaacaaactgactttcaagcagctaggaggaaggactctcaaagcccactcccacagtgacacactttctccaacaaggccacacctcctattagtgccactccctaggccaagcaaatcaacatacccatcaacttcaagtctttgggcaccacctctaagatgtacctcagctgtctctctatttctagcatctatctatttatgtatctatctatttatctgtaatctatctatttacacacacacacacacacacacatacacacacacacacacacttttaacttgtttcctggggttcttcaggaccggtctcactaactttctagctgtttctcttagtcctcttcattcaccaccctgcagccagagtgcttgttaaattacagtccccacttcctttgccagtgtcatctataaagccctttgttgggctcctattgcattttcatgataaactgtcattcctaatgtgatccacatgcatgggccaaccatccccctactcccccaagtcatcttgcttgctggctcttgccttcttcttctttgtcctctagccatccaggcttctgttggtgtcaatgtctacttccttaatgtccacaaaaaaagccatggactctagaacctctgctcacatgagtatgtctatggagtcagccttctttcttttgggttgtctcccactcactcatatctgagttaaagtaatatatcctcaggaatacattcctgagggtcctctgctctgaacatgaaccaataaccaaagccagattccctcagagctcacatacctcctcaagttgtctttggtatgcttagcaccatgatacaatccaggtatttgagcaacattgtctttaatgttatttctcctactaaatgaaagttctggggcagccagaccatgcctgtcctgttgactgtgatgcccacagaattcggccccatgcccagcccatgtggaggctgaacacatgactaactttgacctgaaatcctctctgcctgtggctttgattgttgcacaggggcagggaaaaacagggcaggatttcagaagagatatgatacaaaaggtttgcttttaaatgcccccctcccctttcacacagtcttgctctgttttgtggtattattaccagctccgtgttcaggttttccaagtggacttcacatgcttcttgaagactgtagcttaaattttgttctcacatccactatgttctgttttcttgactcctatgtctatgtaaatacctcttggttcctgtcttagcagatataccttcttccctcaccttctcaggactaatactcagaattcccccgggcccaaactgcctggtttatgacagtctaatagctgcatgttcttggtcctggttcctgttctcaagaagcttcagctccctgcaagtgagatcatcagtggtagcaatgccttgccgattgttctgatggcgataatgggttccctatgtcgaacacattgaaaaccatgaagttcattaagcttgtggcaatcaagaaaagattctggcaagtgagaagagctgatcagtcactcctaaagacagtggagatgagagcttcccaagaaggtggaggggttgggatggggatgaaagatagtgtttcagacagggttttggccagctacagaagacaacctcagctgaggtttataacagtagtgtttcactgatggggacaggcatataggaccaacaagcaatgcttaggccccagggcttggctctagcagatgtttgctgagtccaaaggaccaaggtgaaaaactggcctgatcagaacccatgaaggctggaagcaagggaggggctaccacactgttcccagggtcctagtcctaccgggattacatatggaagaaagcagacacggtgcacttttcctcctcctgagggcacctcgtcacagggctgaaaaggttggagtggcaggtgaggtcagcttttctcaggtcttagaggtggagaacgaagcaagaaaggcagaaaccaaacaggcacaggatatccaggagaagaaatagtatgagaactagcagaaaagccagacaatattttggcagtattcgaaacaagtaggaagtgggatttaagatgtatgtggtgatagtcaagccatgaaggccattgccatgctcagatgatcttcagtttgttctgaaggtgtgaggcgctccagccagtgtctctgtaaggagagccagactgtaaggagagcctctggcagggggagctagggaaaaggaagcaactgggatgcggaggtcatgggaattggtatgaggggattgcagcctgtgtcagcatatcgagagtgaaaacagaatgttgtcctctggggcaacctggagaagagttaataacaggtgatgcttgggaatggagtgtgtcattcaccaactctgtgcacagggaacatgagatcctgactgatgcccccaggctgccacttcagggtgagatccctttgtctccttctcttctgttttagtctcaggtcagggtctgtgtgaccagggcttctctgtctttctccatcattgctcatttctagagattcctaccttcctgattctggtcacatattattcagaatcagaaatggaggcttcagagcttactgaggtggtggtgtcttctgtgtccatttttctttttggcccttttgccattggtgagaccaagtaggcagctttgacaacagaggagatggccacacccccaggatctggactgtccacaaaggagttaggattggggagacacagagagtgaactctctgcttcctctctttcctcttagagcctggtatttttcccccttagcacctgaaaaaatattttccacagcagggtcacctcctgccatttctttattgtaatgccaactcttatttaacatctgccaagcacaaaaggtgcagtcagggctctgtggaaacaaagtgaaatactggcagtacccactgggcttagtcctgaaggaagacaaacaggaaaataaacagaaccccaggagtgtggagagagagcagcagtgggggcatgcttgcaggactcctgctgtttggcctcctctttttatttctctcttcttggaaagcctcttactttgagagaggcttctgtccattttgtttccagctaggcccctgagggtgaagtcaagatgctttgaaagaatgtattttgggggaggatgttaaatagaaaacagcctggaaggatgggtgggcttgggatggtgaaacttcctggcactggtcacataccattttttcagacttaggaattctggaaggagactcctgagctccctggggcagcggtctatcaaagagcaaaactgaaagagaagagcagggtggacatttgggtagagcacattggctttggcatggttaagagacctcaaaagcaagctagggagttggagaagcctcttcatatccaggacagttgtatgcgaagacagttgtatgttaagaagatggccaataagccagcataagtcctaataatgtattcatggtatcaataagtgctgtgattgaatctgtcttccttgactaatctcaatgtaaagcttgcaatgaaaccaagagtacataacttgcccaagatccagctatacccatttcaagtgggcaaaaccaggattatccatcaccatagcttgtaggtaaggtgagaaggtctcctaactgggttagagagatgtgtcagccattaagagcactggttacttttccaaggcacctgagttctgttcccagcacccatgacatgacagctcacaatattctgacaccttccttgacttctgtgggcaccagcaacacaatggcagacagatatacatgtaggcaaaagcactcaaacatgtaaaattaaaaaaaaaaaagtcctgagttattgatggagctaagaggaaatgccagcagagagcacatctcccacagcctcccacaggctcctccagtcacagaacacaactcacctccaagattagtcctgaaccaaatgtgaatgaatgtggccagggaagccatatgtagactgccccaaataacatagtccaatgtggaaattgttttgtgtggattcttagtcacagaactaaataaagtcatacgttaagttttttttttaaccaatgcattgtttttcaaatatatttggtagaaaaaaagcaggttgtagccacagcatagggatctctgccataggtttctcaccttaccggatggtgttcttagctcttagcttctagattggtgggaattactggcttattgatattccagaaggttttgtctgacaatcactaagatgtttgttatgttagacactgaagtgggcagtgaatggctattaagactagagatagcacaaggtaacctggctccggatttgcagcattccacctctccagagagttctattgagtcaaccttgtagaacctttagtgacgtgaatgaggcttttttttccccctgagagcttcagtttctatcagaatgtgtcccagtactgtgtccagtggcacagctcaagtattcactagctggctggttggtcagaaaaaccctgggaaagctcagacaaatgtccccaacctgtggcacattttttttgagtaagggacaaagatgatttggcatcactaccatagagcctgcagacctttcttaaggccagccttcatgacacctatctaacaggtctagctaactgattttcccagatgctctctcactggaaaagttgagacctcgtgaccttgattgtttgaggtcttatttggaaacacacagtcagacatctgtcacagcagtggtactctgagggattagccactctccaaaaagacaaatgtggttttgattatctagatacattacacacacacacacacacacacacacacacacacacacacacacatatacacacatacacgcccattggaaaggatgaggagagtgtaggaggaagtgggggaatatgctcagtatacttgtatgattatgtcttagtcagggtctctattcctgcacaaacatcatgaccaagaagcaagctggggaggaaagggtttatttggcttacacttccatgctgctgttcatcaccaaaggaagtcaggactggaactcaagtaggtcagaaagcaggagctgatgcagaggccatggagggatgttccttactagcttgcctcctctggcttgctcagcctgctctcttatagaatccaagactgccagcccagagatggtcccacccacaaggggcccttcccccttgatcactaattgagaaaatgccttacagttgtatctcatggaggcatttcctcaactgaagctcctttctctgtggtaactccagctgtgtcaagttgacacaaaactagccagtacagattatatatacttgcatgacatatgtatgagagcatccttatctatcatagaaccatagatcgtggctgtatatagtcaaacatttttcaaaagaaagctttcctgttgcagtcctcttgttagccttgctgggcatcttagtacttttaagggggctctctcatgaccaccttaacccaccttgaagcagcatgcagattttcatggtttaaattaaaacaccgcagtagctatttctgtcctttctcacatgctagacactatggtgagggctttacagttgtagcgtgttcccacctctcactgtcttgcagtgctaacatcactacccttcctttttagatgacatagctgagatttgcaggttagtagctcgccaaggtcacatacctgctccaaacctcttcccggttccaaaggactgaaggaagataaaatattgtaacttgtgagttgtttaggagcccactgccccggcctgagactgagaacaaagcagaacagcccccaggcatgccagggcagggctgttgttaaggtattcctaagaacatcttgactgtaaagataaaaaggtatgcaaggaccagcagggctatattatctaagtcaacaccatctggccagaacctcccctctgtctattgccccttgatgcagggtaaagtcatacatcaactggttgctatgtgaacaaaaataagcccccggcacacaggaacaaagtcctgatgctctgtgatctttctgttaatgtttgaataagccaatagtgtgtcgctatgctgaattccacacccctaagcccctaaccccataaaaacccctagctttcaagccttgtggctgacatctgttatctcctgtgtgggatacatgtcggtccggagctccgtaattaaacgtcctcatataattacatcaagagatggtccttcgtgattttttgggtgcacgccaaatggggaattgggtgggggtttccccactagatctaacaggacagacctctgtccaaattcctttgcatctttgtgatgctgagcctgagagccaggtgaaaggaagatggaggccaagtgcgtccttggcccagtcttctttccccttatagcctcttgtaagcttccctataaccatcattgtcatgcctctgcctctcagtgccttcccttgcagattattttcattaattaattagttcattcactcatccctccagctgatacctactgcctgtcggctgtgtactaggtactctgtgggtattgccctcagcaaaggctctagtttcagttacttctggatttgcttcatgcaaggccagtgttttctcttggaagtcatttgttctaagaacttaaccacaaggtagataatagacagctttgtcaattgacaaaaattgcaaggcatcagcccacagatggtgaggtgtgcacagcaagtgtacttttattgttaagcaagatgcctgcctctttccttaaggatgctaaagatggggccagggggcatagtgggtgagtccaggcatgacttgaatccacctccaaaagccccatgtctcacttggtgactttgtaaattaaaaaacagcagggtatttaattttatagaaatcagagtccagcccttggtcccatccctacattatggctgagaagagtcaccagggttgtgttatgtctatagttatcctactttgctaagagctgtggtgttgaaagatcctgttagcagatattcataagcccttggatatctagcttgtattgtagtttttaaggtgaagactcttatatctgctcattctaatgtatagtttgctgttgcagtagtggcaatggcaaactatagacaatggtgacagctggtgtactctaaatcaaggctaaaatcttctgaagccctctgtaccaaggtaagagcaaggatagccaagccacctgtggagtcagccccaggacaaggcagtgcactgctaggagaataacacattccaaagtgtggcccttagagaagtgttggctacccagggaagcaggaggaagaagagccccagaagaaagaagtggtggtcaccccaaaccctctcacaaaggggtgctctgtctaaggcctgggcctttggctccctctggagagggagccagctgactctactcctcagcttaatgacactgcccattccaaccatggaacatcctctccttgctctgagcagtgtgctacttacaagttgacttcgatgatggcttgctcttagggttgtgggttaacctgagctagtatgggatttggtatcagtatactcttgtcattagcatactcagtgtgatgtgtctgacttgaaaagcaaaccaactgtcatggctgataaatcagatttttgagtgaaccatgtgccagccccatctgggtctgtgcagaatttactggggaaggtatttcattgggatctttctggggaaatcttctctgcctcacccccaggcctttggcaccactcttcagctgatataccatccagctttatgggtcttctatagcagtggagtagggacttgtccatgtacatagacactatttatcacacttcttgtccacagagacactatagactacagcacctagcaatctatctccatattcagggctttctttttaatgtaattttttattattagttttttgaaaatttcatactatgtattttttatcatagtcacttgctccctcactactccttttatcttttctgggccaaacttggaccccctcaccccctcctttcctctttttctttactattattacatatgtacctatgtgggaactaaagggggtgaggggaaggagggggaagggaagatagcccacgtccggccagagttcctcctatgctctgggcaggtggatgcgggagggctgccagacactttccactctgccctgagtgggcatctaagccactgaccccactcgacagggcatggacaaggggcgcccctgaccgggggccatggcgtgacaccctgtagcctcggggttatgggagagagggcagaagggagagaggttcccacacagaagagagtaagctcagtgggccttgatgaacagagacagtctatggttttagagctttattgtagaaaggcagggggaaagagagaaggtagagagagactggagagaaaggggaaaaggggagagagaagaaaggctagagtaagaggttagagagagagtgtgtgtgtgaggagagagagagtgaggagaggagaggagaggttagattagagtaagagagcaaggtggggccaagcagcccctcttatggtaggctgttatctttactgttgctaggtaactggggaggagtttagcctgaaggtcagaagcttgggacattgtctatatgactgctagccaaacttctcctgtgggggctgagggggcggtaacttcaacaggagccttgagtccaggagatatgagggaactccttctgtcccatgtaggtgaattatcaccaccgggttccagggttcagctctcaacttgactggaaaccagactgtctttgcatagcccaatgccccacatacctatgtgcatattaatatttaaatgcaacttgctgagtccagttagtattgtttatatgtatatgccttgagtgtcgaccacttggtattggacaaccaattaagggactgtcccatgtccatgctgccatgtcaactagtgtcattgtttgggtcttgtttaggaaaccatactgttgcaatgtcatatatgtagcttccttatcataaataaaaggcactacttataccagacatcctggtcttctggcttttacactctgcgccctcttctgtgatgttccctgaaacattggtgtaagcattctactttagatggaaggggctgggcaccccacaggcagttgtttccttcactttgaccagttgtggctttctgtaattacctctatctactatagaaatgtgtttctttggtgaagggtataagctctatttatttgtggatataaggatgtatatttagagtgtagttaggaattgtactggtttgggtcagtgtgtattacattttcctctaggtcatatgacctcatcagccatgggtagttggctaggcttacagcagcaggcatgaattcctccctctaattgaccctaagtccaaccagacagtagttggtagcaaccaggattaagtgccactactgtaccattggggatatcctgccaagctgataattgttgtggttcattggtatcacaagtgggtaggaacactgattgcttttctcccttggaaacttgcatagcacctttagctactatgagagctagcccttaggtaggagtctcccagtctgttcaatctcagtttctctaagtcatatgtatgaagagtggtgtcttcagcagtaggaacctacctttaacctctgggaagtgaccgatggcaagcaacagctttatatttgctatgcacactcaagacagcctacaaattttgctcactgtcttacccccaggtcatgatggcattctcctgttttattatttatgagttttattgatttcttttgcatgtgtatgtagtgcatgcatgtgtatatgtatgcatgttcaaccacaggtgtgtagttatacaagtgtgtgtgtgtgtgtgtgtgtgtgtgtgtgtgtgtgtgtgtctggaggtttgaggttgacatcatgtgtctttctcaatcactctccatctcacagaggcagagtctctctgcagctgggttctgccttcaggctattcaggtactgtaggcaccagactggaatgaaaggcatgaagcctgtctggacagggtgggtctacaaaaacttggttggccagagtgcaggggagaagtaaacctctgcaagatgttttttggtgttgcagccctctttttttcaggggtaataagggttatataaaccttggggaatggatagggtttctaagggtgaatgtacatcattggttggtactgagatgatgagaatgcttcatttgcatgaggaggaattccatgtgcttgttggacatgactggtatatgactaacataatggtggtagaggtggggccttgggggaagggggaagcaataataccaggacatgaactggaacatgcagacccaaagcagggacggggtgatccttactcctactggttcccacatctctcatttaaatgcacaactttccaatagaactagtcaactgagaaagcatgctctggaaattgtctgtctctgccttctagtgctggaattacaggtcactgccatgcccagttggcctttacgtgggccctggagatctgaactctgggcctcatggttgcctggcaggtgctttgcctactgagccatctccccagcccttcattatatttaatatttagttttcaatctaactggagttgatttttttcatgcatgtcaaaattatatgagttaaattttatttttccccaaagacatccagttaacctggaattattcattggcagtgcctttctctgtgctcttacttacctgtatcctaagtcaagcctgtttataggtcctgttatcctccactgtgactttgcttttgttttaccttgcaccagatgtcatactttctttaaaacacaaacaaacaaacattttataagatttatgcatttcattttatgtgtgagtgtttttcctgcatgtatgtatatgtacagcatgcataattggtgccttgggggtcagaagagggcataagatcccctggaactagagttaatgatgcttactaaccatcatgtgagtgctgggaattgaaccctgcctggtcttctacaagagcacgaggtactcttaatcactgagccatctctccccacctctagtttcttaataactttataataagctttatatgtgatgatgcaattccttcaaactgaccatatttgccttgattatataatttttgttctcagcatttacacacatatattctagaattaattggtcattttttactaaactccagatggaattttaactaggactccattgaattggtagattaccagagagaattgacatcctgtaacatgttgccatttttatgtttcctctgagtctgattaatttactattaaaagtcacttttgatgctataataattggtattattctaaagttacatttttctaatacttttttagcatataaatgtacaagttaatttttttccattttttattaggtatttagctcatttacatttccaatgctataccaaaagtcccccatacccacccacccccactcccctacccacccacttcccctttttggccctggcgttcccctgtactggggcatataaagtttgcgtgtccaatgggcctctctttccagtgatggccgactaggccatcttttgatacatatgcagctagagtcaagagctccggggtactggttagttcataatgttgttccacctatagggttgcagatccctttagctccttgggtactttctctagctcctccattgggagccctgtgatccatccattagttgactgtgagcatccacttctgtgtttgctaggccccggcatagtctcacaagagacagttacatctgggtcctttcgataaaatcttgctagtatatgcaatggtgtcagcgtttggatgctgattattgggtggatccctggatatggcagtctctacatggtccatcctttcatctcagctccaaactttgtctctgtaactccttccatgggtgttttgttcccacttctaaggaggggcatagtgtccacacttcagtcttcatttttcttgagtttcatgtgtttaggaaattgtatcttatatcttgggtatcctaggttttgggctaatatccacttatcagtgagtacatattgtgtgagttcctttgtgaatgtgttatctcactcaggatgatgccctccaggtccatccatttggctaggaatttcataaattcattctttttaatagctgagtagtattccattgtgtagatgtaccacattttctgtatccattcctctgttgaggggcatctgggttctttccagcttctggctattataaataaggctgctatgaacatagtggagcatgtgaagttaattttgtatattgaagttgtactaggctctcttgattatctaaccaattttaatagcctatctaaagatctttttgaattttatttcatgtgcacttctatacttctcccctgtgctattatactagctaagacttcaagtatagattgaaaagaaggaataataatctcctacccaaaatctagggtggaaaaacttccacactgttgttattatgcatgaagtttgctataagttttccatggttacatttctgagacaattcttaagtgactaattttatttttctgtgctgcagttgaactcaggatcaagcataggctaggctagtgctctaccattgaactatctccttagcccactgtttcttgattcagggtctcaccacgtagctgatgccagccttgaactcactatctggctcaggaggtcctggaacttgtgatcttcctgcctcatccttcaaaggactagagtaacaacactatgaattgcttcaaagttttcttgatgaacagagatgaactatactaacttattattttgtatctattatagtaataacacaaaatttatcctatacttttgaaaaagtgaattacactgattttctaatgttaaagtggaaactttgggccaatgccagctttattgtgatgttcttttcctgtataagtggtcttgattatttagtataatgttacatctgtgctcaatagaaaatgacctgtgattttccctttatgcagtagtcttggtcaaggtttaatgttaaagataaattagagagtcttcttttactactcttgaagattttgtaaaattcagatattcctacctaagaattcatttatggagccatttggtgtcccgtcccgcgggattcagttatttgtgggtgcgagggggacacaaacctggaaggaaatgggaggaagggaaggagaagcagagaccaggaagggtgcctatcaaggtctcgtttattaggctgaggtgccttgattttaaagcatacatcgcggggtgtaggggaggggtcgagggggaattttacaaagaagtgggcatctgctgacatgagggccgaagttaggcgccaggcagagggcactctgcatcttatctcgggaacatagatcctccttgacagccttgggtgtcaggccgggctcaggcgtaactcatgtccttggatggcatgggagttcaggaagagatagggaagaggggactataattcagcttttacagcctcaggttccaggaagggaatagggaggagggagtgataaccagctcccagcacgaggccatttggcctgttagggagattgtgaagggctcggtttctcacgggatggtctctgacgatttggcattgtgggttttgtagaaaaatatttatgtgtatgtacgcacatgtgtgtgtgagtacagagaggccagcggttggtgtcatatgacttccttgagctcattccaccttatgtattgactcagagcctattgctgaatgcagagatcatacaattagcaagtgtgactagccagcttaactaaccaggagtaggggaggagaagatagcctcctgcctctgccttctgtgccttgagattagaagtaggctgccttgtctagctttttaatgtatcttattgggttctgaactctgaacattaccattgtgtagtgagttcttttctgttgagccatgtcttcagcctaattatttcttcttaatttttaaactttgttgcatatgactatgtataatattcccccttatttcaggatctcttagtttttaagattatatctgcttatctttgctttctgtcttttttattagtcttccttgaagttgatcaagtttattaatcctttatttccctggttgtagatttattttcatttctattcaggttctttatatttcttccaaatttggggctcttaatatgctattctgttttagcttttcaacatttttacgtatatatttattctaagcatctttttttataacgtggactctttggtgtctactataattgttgtatctgaaatggtggtacctggcaccccttaagtgtttggccaagtaacaatgaatgaatgtgtgaatgaatgccaaggagagagctaggatgttcagtttgttcagcaacaagctaactgctgcagaaccctttgagtctctgtgctctcttcgcagaatgtggcaggcagtttcatgcttgtctttttcatgccaacccccctaggaggacctttggtttctttccccactcccatcactcctaattacagcagcagcaagaatctcatgttctctgccagcatctaaagggcccttccttgtcaatgttctcccaaggaaagatcgcctcccacacctctctccattacaaaagagcccaaatgactctgggtattttaaggggtacaacgttgtgacagtgacaggctgatgtggcatcagcacaatgactccgttggatgtgccattatggcttttcatgtcatttgggtgactgctgctttgtccacatttagctaggtgagtcccagagccaagggagtttattttcagtgtgggaagaaaggctttttggatctgcatggcttgccctcccctctctctgtatgtaagactccaaacttcacatagcttcccctgtagcttaaaaagcacaaggctataagagtgagtccctatacagcaataaattttaattttactgatgaaccaactatgaactggaaatgtgtgcatacaaacttataaggatacatgcatggggagggcagatgaaccagagagagagatgttcttgaaaagaagtagatagataccaaagaagggtgacagtggatatttcagatgacactcagaatggtaggagggactttgcaaagtcatttgattataaccctctgtctttgtctagatgaaaaatccccagacatttattattgacaacatagagatattttgaagtatttaattatctgaggaaggagttaaaatctgattctaatagcttctgaacttcaaagcccaataattctatttaccttgatgactgctgtattttaaggacttaattctctacctagtacattgtgtgtgctcaataaatatttgctaagtgaaaactacacacatacctactgctagtaaatgttcccttacagttattctcctcagggcatctggctaacctgtcactttagtaattcttacaaatattattattattattatcaataatttgattggcagatagacagatatatacattgagtggctttagatttatgaagtgagagttcaagtatttgttatgcatcacacactggcacagttactgcaaatgtagcagggagcaaagtcactaaaatccttgctttcatgagacttacatttcaaattatgtcaacaccacgataagtaagtaatgtattcctagatgtatccccgagggggtgaaaggagaaaaagtgggaactggttctctccttccatcttgtgggtcctgatggactgatcttagtcttagaagcaagtgagcttgctgagccacgtctgtgtaccatgatggtatctttttaatttgatcgttaagatgggttttatagagacgttcactttatgatgttttatattcatttattcattcatccattgtgtgtgtgtatgttggtgtgcacttgtcacattacatgtgtggaggtcacagaataacatataggatattatacaggccctgagactgaactcagtttgtcaaggatttgtggcaaggaccactagctgctgagcctacttgcaggcccaagaagttcacttttgaacaaatccttaaagtaagaaactaagcatgtgcatgcatgcaaacaaaggttctaaaaggaaacaacaagtttggaagccccaaagaggggagtgcatctgggaggggacaggaaagagctggagagcagcatggatacagttcatagacaatcagagccaggttgggtggaatcctgcaggttatgatgagactgactcttagcctttagagaggatcacaacccacagtgcttcatctcacacttccataggctcaccctggctgctatggtgagaagagactacatgagggccaagctggaaccaagcaacactttgggagagaactgcagaaataaacatgggagatggtggttgctgacttaggggtggcaatggtgtgggtggtaacggagtgaaattctggtgagattttatagatttatcaatgggcctgaagtgagatgtaagagatgaagatactggagaaccaaaagtgttctgaaagttttaccatgagaaattattaaggtggcattgtaactaaactagggagaagaccatttgtaaagtgcaataatgaactcattaagttctaggcatactgactttgatgtagctagtggatgtccacgcaggatattaagtagggaactatgtatgtgattctggagttaagggtagagattatggcaggatgtgagtgtgtgtatgtgttctgttttttttttgtctgtgtatatgaaagtagatatgtaaatatatatgtatatatgtatgtacataaagggtatacagcttctcaatagcttttaagactatgacaatcaaagacaatcaaagctgatgttaagactctcttggtatatgttccatagatattccctccttaaaggctgtatataggttcaggagctctactgtagcagccacacactacaaagcttgagttaattctgcagatgaacccgcagagaggagggtgcatctgtatgactcccattacctgagtgcagctttgtgtgtccagtcatctctgctatcatcctccctgtgaaggggaggacatcctgaccctggatattacaaatactcaggtcagctcacctggataatgtcatttcaccacactgacaccttcttccacatgttgaggtatgggacacggtctgcagatgaattcactttccatttttctgatggctcattcatctcgaggtgagatttagaggtagaagtgatcaatggacaggaggtaaatcaaagcatgcttaggaatggccaccaatcaagaagccttgaaatcccgaacacagcttctctcaacatgtcagagatgttctcttccaaggattcctaaaaagactgtactttcacagtgctacagtgggtgtcacggatgcagagagggagaagatttggttggttcctgtaaaggacttgtctaatagcatgaataataattgaagatggaaggtagaaaagagtagcatgggttggggttgtagctcatgtggtagagtatttgccgagcttgcatggggccttgagttcagtggatttccaactcttcatactggttacagtggcataagcttgtaaccccagcatctaggaggtagaaagaagtggattagaaaggtcatcctctgctacaaagaaagtttaaacttgcaagcctggactatatgatacctgtctcaaagggtagaggaatgatgtggttaacatatgttactgggtaatcagatagcaaattccttgaggctatggagtcagagaatggatattaaaacagaagatagggcttgagctggcccttgagaaatggagaaacttaaataagatgggacatgttggtttctttatgtagttgtgtagttcatacatacataactataaatcatactacttttatatcatatcctatctacattgtcagccttcatttactggagggatgacctaggtgggaaagaccatggataagattaagaggtggaactatatatcaatactttgatctagtcaaatatatacctcctcattcagcaaatgaagtgtacactaattgggaaggccacaatgaatacagtaggacatttatgcagaaaagtggtgacaacagtatatgggttcatgtcacatgtacagccttagatgtcaagtcaactttagacttttatcctgtgggcaatcagtagctatagtgttttcagaaaatgtttgaattctctgtaagtaatgatctgtaagatgtcttgacagcagtgtctaaggaggcccgggctatgaaatgatttatggtagaaatgcaaacacaaaatttggccaggaaaagagtaaggaatgttctcaaggagttaacagggagacatggaattgtttctaagtagagatccacaggttgtctagcatatcagccacatgcttgacacaggcattcactgcctccatagtcctggaaggggtgcagaaaaaaagggagacgtcagctgtctccattatccatctttttctgtttccctgtctcattcttgctgttgcctgtctgtgaatattaagtgcctgtccacacttcaagtgagctcactaataaggaggtcagacctcagataagtagaacaagatgcagtgagtccactcagtaatggtcaagacatctatcattggtggagatcattaatggcttaaaacatgaccatatattgttaaacttgactttctttataatcctataaaactggtatcaccatctcctctttgtgaggagggagctgagatgcagggaggctgaagggcttgtcttgggacttagaaatggcaagacacatcttgagctcatccgtggagctgagatgttggcttatcatctcttatgttgccttgggatatgtttcatggatttttctctgtgatgagcagacatcctgcagagcatataggtgagacagtactgattggaggagaggcaggctttctccattgcttggtctgtttttcaagggggtaagccttgaaatttgcctaaacatttgtcaatgtcaggctcaagtttgatgcaagcacacaaaggggtcttctattcacaggggtaactctgttatctgtgaagagggtcatgcctattccagctgtgggcacattaccttttcagggtagatgctattaacagatcacataaggccatgatatccaatatgggcctttctttccttagtgcctagaagggtttgatcataattacagtgtcactgaatagcaggaaggatagctctactcctctctcattggtccttgcttaactagggctacctgaaactgcatcagctcatctttggcactgacccattaaagctacctcatgcttcttgctaccactatagggaacattggcatatatgatgctagtttctccatttgctaaggactaagactcttacagttacttggaactctgggaaggccatctttgcctaggcaggggactattctctctgagtcagagatggagcctttcctgaacatgaaggtgaagtgaaactagacaaagtgatgtatattaatgtactagggttgccttaaccaaacacacagactatgtagcttaaataacagattcattttgacccaattctggaagctacaattcctgtattgtagcttccatatccaccaatccatccatccatacatccatccatccatccatccatccatccatccatccatccaataaactgaagtctcatcagcatccttgagggtgatctccttggctttcagatggcagatttctcactatgtctgctcatagcatatcctctgtgcatatatatccctagtacgcaacatgtattgaagttgcccctataaggacactaatcagattaatgacaaatgatatcatttcactttaataacccatttaaaggtcactttccacacgcaatcacatgctgagttactgggattaaagctctgacatgaattggatagagagatacaatgcagcccctaacagtagggaaagttctcacctcagtccttgcttcttctcttgtcctcactccatccaacccttccctcttttccttcacaacaggctggatccagagaacaaagggctggtgtctagagtggttgcttagaaataccttgacagcccactcatgatcaggagcgtttgctccaaggcacctgccagcagcattcaacccccgcattgggaccccctgtggtgcaggagactttccagttttatgtattgaactaattaggaaaagaaaataaaattctcccaaaacaacacttttttaaaaaaaaaatcaaatcagatactgcaaatagggcatgattactgatcctcacctgcatgatgaaagttcataggtcattcaacaaactctacccgtcccactcccactttcccacactgcccttcagctgaaatcatcactgtctctaaggtattctgcttagctaacttgggccacaataaactctctcctttccaaaacttctataatatctaacatatatagctcctagctgatatgcattatatggtactttggagcatatatttatatatccatccatccatccatccatccatccatccatccatccatctattcatccatccatccatccatccatccatccatccacccatccatccacccatccatccacccatccatccatccaataaactaaagccttcagggaagaggaccacccattcctcatctaagttttgtctgcttgaagtcacagagaggcaccaagtaggtccgtcatgtttgctgaatgactgagtaattaacaggtttatctgaagatggacgattcattggactcacaagctagaaattccttttaatttaataaggcacttaataggtcatcatgtagattttgtagattatggcctttgaaaaactttgaaatgtagcaaaaataattttatctgcctcggatatgtgaaataaacaaagccctagacccatattaggcttttgcttcctccttgccctcctgggcatcttcaccttaggggttactcaggctctttcatgatctctcaccatttgtaagatgagaggataaactcttagatgccaggtgattttcacttcggcttcagttttcagagagtggaggtaggtatctagagaagggttctgaagccatgctggacccttctatgaggagtatcaggaatgatgaatcatggcaaccaagggacaggaggagggacaggtggcatatgtagacatcttctctgaggtcacactcagcaataaagctctctgaatttatgattcataagaaccctaaagaaacttgtggggccctatagtcatcagcaagaacatttgtgaacattgtaagtaggagtgctcattagcagagatttctggtcaaccaaatgctggctgagtacgtattatgtgacttgatctaaattcaggaaaatgtgccctgggcgtaggacttccatacataaatttgtttaattgcattgatgtaaaatgtgcaattaagagggtaatgagggtggttgtcacccatggtggttgtgggaaatttttactttcctgtttatacttctctgtacttttcaaatgctcgtgtgctatttttataattagaagaaaagaaaaagactgattgatcacccaatcgggggttaagaaaaaaatgaaacctgaaaacttcaaaactggcttctgctcaccttagtaaacatgtgtccgtgtcaatcaacaaacattcattacttacactatcatgagtgcttgagggtgacgagggactgagtcaagatggaatgctgttcacaggaaaagttgtttcatagaaagcaaagattttgacctagaccttggtagagaaggctaacaatttgcataccagggtaagtgggcatctcagggagagtatagacctgtacctgaagggaacagtgtgctgggaagagcaggaagagcgggggagccatacaagatagaccccattgaggagattcagcaacagattggatccagattgatgggctatggtccctaagtgctactgattcctcgtgagggtaaggatagctgccactaactccatttccaaatggagccacccactgaagggccctgagtagaagggcagactcactggctgcagtgggttctgggggctaatgaggctgacacagtatttcaggctattgcagggacgctgtctggatatcctagatctattttagatggggatgccactgagtcctgtgcttttctctagtgttcttgattcttaccactcaaggaaaccagggtttcagttatgtcagtaacatattttcttggtgggcaaggctaaggcttgtgaaacttggagttgtgatcatagcttttatgtcatgtctccatctacctctgttttctctgtctgactttctcccatcccatgctattagccttaggttcacatttgatttaatagtcaaaacaattaaatattatcaagttggttcctggatttattccataatgtaatagggtagcctttttaaaaacaaaaacaaaaacaaaacaatggtgtcagctaagtcagattcttttagcagagaaacctggaaactgttggaggtggaggaatagggtagactacaggtgcctggatgtcagtaagctttgagctctaaacagctttatacaaaactcaacggtctcttagtaggtgctatgctcatctcccgagctagcaataattagagaggcctcatagtagttttctacttatgcactgtcaggtggagcaagccccagagtatagaaagcttcagggagtttatgaagccccaaaggaagggtctagaacagaaatggtgggtccatttcaaaacaaggccagattgcctgttttcctttcctgctttaaacaaacaagcaagcaaacaacaacaacaacagcagtctgtggtctatgtgacctggccctggatggcctagtcttaccaatgtagcccttatgtcagtcttgtatttataacaacccttctgtctctgcctcctgagtactggaattataggcatgttttactgagcccagcttcagaatgtcattcctttatgaaaaaaaaattaaatcctccttcccaggagctcattgtcagcagccttgtttgtagtcttattatgaattcaaaaatatgtcacatctggaagatctgtgcttgaagtgtgaatgctatcacaggaatctttttttttccttttaatcataggaaagtcttttaggtggggtgttattgtcaagactaagttggagaaaattgtctgcagttagggctaaatgacagtgatcattccacaactcatctagagcttgaaaaatgaatatttagatttttgtattggacagaaaccatttgtcccagaataaaatatggtagctggagaatggcagcctgcagccctgatgtgtgggcgagcctttctttatgaaccaggcatattctggagatcccatgtgtcagtcaggtttttgtaaatggaatcttttctttttccttccttaacttgccctgtaatttcggcagtatttaatgttcatccctgatttatcttgagttggtagttagctgctaacattcgactctggatctgagtacttcttctttgctttcttcacttttattctttgctcttttcaacagatgcttagggaatagatgctatgtgccaggtacagttataggtgtcgggaatatgaataaggatgatggggtaaataattggtgtaggagacagtgaaccccaatcctgtgggtacagtgcagctgtcacggcacagaacccctcagtctggggttgggcaggagaatttcctgggctgagaactgaaccatccaagggtatgaggaagaacatgcttggaggatgcccgcttaaagaccagcatcagagacatggttgaggctggttttctagaacattgttttggtgctggtaagaaaagggaagcagttgatgacctaggcttagcttctctgtggaggagaggtgaacagttcagcttttattaacctgacggggttgggaaggaacggcgggtgatttctctcttttatttttttttcctgtgatcattttatagtatgagctgtcttcaagaggatacacccaaatacgatgaagactgatgagagcataagtatatccacttccaatgggagctctaattgttgtctagtcttttaaaagaaatatttacatagaaattacactttttcccctaaggtaaagacatagtgtcaagagataattgatagattaaggggaaaatggtatgtaatacaaagtgctatataatcttatacaaagaggttcttcaaatgtattagaaaagatcacctggaacattggagatgactcccttgataaagtgcttgctatggaaggacaaggacctgaacttgatccccgcacccatgaaagctgggcatagtggcagcacccacataaacccctgtgctaaagaggagacaggaggatctccggggctcactgctggcttctcttagtacattctgggagctctccagattcagtgagagagagagtgtgtttaaaaaaaagaaaaaccataccagcctgagtttgatcattttaaccagttgccatgaattgcatctgtagttccagtacttctgtggggaaacaaaaagcagggacaaaggaattgtccagaagcccaagagcccgataggttggagtttacagaatgacaagagaggtcttacctcaacaaggtggaaggagataaccaattccgtaaagttgcctcctaacctccacagagatgttgtgggatacacatgtatgtacatatacatgacatgtacacagaatacaataacaataaatttaaaaaatgaggtggagaatgagtgaggaagatacacaacattgactttggcttctacattcatgtgcacacatacacacagcagagtgccagccacagaataaaatgggcagaagagcaagcaaccaacgtgatgtagttttcatgcattccactgccatcagtatcgtggtcagttgggtgcttagtagctctggctctgtgtctttatttcaatgacctagatttatgtgtttctctgttgcagatatgtgattgtggtgcgcatgcgtgtatttgaagaaggagaatgtccatcccactgaccagctctgccatggacaatggtccctctacttgagaacacaaccccagatatctcctgggatcatggcaaatgccaaggacttattaatttactgagcattctatgaccagtgcacagtaccaggacatcacatggtcagaagcaagtcttgacctcagaccactcaagatccagtaacagagactggaacataccagannnnnnnnnnnnnnnnnnnntaccagtttgtaggcatgctgcacacaatatatacgcctgatggttgctttggttttatagaagtttgaatgtccctggagataggtgagaagacagatgtatacacatctggccatgagcactcatcacagcagggtagaaagggaaggaaggtggggaaccacatgtttttgtattgcttatgtcatacttggaatgcatatcacttttgtaatttcaccatttacaaataagtatgtaaaaattaggaaattatcagaacaccttttctcccctgctaccttctagccacaatgctgctcaaagcagagacttgtcagatcttatattctgtcagatgagatgtgtcctgcctcctctcagggattgcacagcatatggtaatagtgtcattagcactgtcccatcttgaagcaccctctctttcaggatgtggggttggttcatttattcatttagttctttccttcatcattattaaataaataaaaacgtgtgtgcccattgcccactgtccgctagttctgggctatccccggacactggctcttcccttttcttaccttcccacacatcctgttttgttttgtttttccagctcttgaggtaaatagtcttgaggtatacacactagtgaatatcttgaggtagttggaagggctgaccagcaggagctctggctttttcaactcagtggtaaagggctctttagagacttattctttgccctaccccaatgctgtgtaatagaggcattttctcggctccatgcccagggtaacagagctgccaggcaggtgtgtgagtgttggttaattaggtgattatatgtgtcccacagcctgggctgtctgctgctgagtctgggctgctgggaagccctccctccacctgggaatgaatttcttctgtaaggctctaatgcaggaaaatgtaggaggaccactgcatgcccagcctctgtcttgcctctaaatggttctgcttctttcttctatcaccacttatgatgtggatccggattctggtatgttccagtctctgttactggatcttgagtggtctgaggtcaagacttgcttctgaccatgtgatgtcctggtactgtgcactggtcatagaatgctcagtaaattaataagtccttggcatttgccatgatcccaggagatatctggggttgtgttctcaagtagagggaccattgtccatggcagagctggtcagtgggatggacattctccttcttcaaataaacgatactttcaacccccacagctttggggccactaaggaaataaagtaatgggtcctcgtctcttgggaccagactggaaaatacccattttataatctctcataacaagacaatagagcgctgaggaccagtcatcttgaccacctattctgaactctaggccctgtggcagacatctgaacttcatgtagttttccttaggttcttcaaggctttgccacctagggatgtcagaccgacttcaggtttcagtggctctcatattcccccagacccatgaacttcagaatgccaatataaataacaacgactctttgggggtacagatgtaagggttcattcccgtgtagccttgaagacagaataagctgatggcatattaaatgtctttgtaccctgcagtccatagtaatatcacagaggaatagcagaccggagagctaacatgtttctttacacctatatcagaatttgtgtatttcctcatgtctggaatgcttatatttctagagctgccagtttaaaaaatagtgtgctccaagaatactgcctggtactagagaagctaacctctgttccaaataccatcattggctttctgtgtaaatttgttggtggagagagaagtttaaaggaagacacctcacagtgaggctggggaattaggtgggcaacgcctttatttacagatgtgagctttgtctaatatttaattgtaaactgattattaacaatagcccacatatagcctacttcctgttatggtttgtgtgacccacttttcaactgtgtgctgccaggaatttcatttataaacttccttattgtcaagccactgtgttccagtgtgtgtcaatactgtggaaataaaatttataccccctggacccatgcagattgatttcgttctggaatgaatagaaatataacctgcgcacgtcaaatgcatttctagagcatctgctatccatggggaagcttgggagaaacataaagacattcaaagcacacttcctttcctctaagaatctacagtccagccagcaattttacaaggcttctgggagtggcatgcacgcacactatcatagtctcttgagttttgggctattattattaccgttttcaattaccctgtattgaacaccttctaagatgcgggtaactaccttagattgggctccctggaactcagcgtggtactggagaatacatgcaggctcttcaagggtgtgctcttaggagatgctctcaaggatgtgaggggagccaatgttgaatggaagagaagtggtatggaccgctggcacagggtgtactttcaggggcatgtcccctagaggccagcacaatttcagtgagcgccgctgcaatgtgtctgtgtgctttgaaggaagtcatcaccaccaggattcacatgcatcttaatcactacagtgcagatttttgagggttttctgcttacccttccttaagccagaaagcccttcagagtcattatgccttagatatacacgttgtagatgaggcaattagacaggtagaaaagtgaagtcatttacctaagactgcccaaccattacagggcagcctggcacgcgtgggagctggggactatcagattttattagtcacttaatcttcatatggctgtttcacgacagccatgatcatttgtagtagatgaattgagaagatgaagtattgacagaattggtgatttggccggtgtctcagaactaaggacaggagaggccaggatttccctcttcaactacactgtcttacaggaataatatgtccagtgagggagacgctactgtgactggagaagacatcatagccctcgtgtattttatggcctactgatttgcccttcattgttctgcacagaatcatgtccttcaccataagtaaatgagcaggtcacaaagttagacaatttgtatgatttttctgatctcagtttctccatctatgaaatggggataatgatgacttcccaacaggaatcaaaagaaactgtgtgagaactcttccaacatgacacatttccctgtcccaagctcaaagctttaggactaaccaaagacagtcttcagtggacagacactctgaacatagccatggtatactgatcctgtctcttctcctttgcctccttttcttggaaggaaagacagagagacaaagtcctctatgcaatttgtgctgacactagtctgttagtctaatcataacacagttcttagaaacaaacctagcaacagcacttatatcttacttttaaggtttaattggctgtaaactcgatttacgaggttcctttccccatcaagtgtgtggagtattgctgagttctggttatctcaatgtccccttcttcagccagtcttcttgttatttaagaagccaatcagatgtttgttctctgggcatgtgccctgggagccctaaccattctcagcgaaggtggaggcaatctagtgagccttctgttccgcattatccacaggggtgctctcccactggaatctctgacattgaattcttccctaagttctttttagtttcttccccgtgtgggtgtcctcacccatcttcagggtagctcttccctggtctctggtgcccatctcctgccttgtaccatctgtgataaacctgcagctcagatgagctccctttattctgaaaccagccactcctcactgcaggttccaatgccagtctatgaagcctgtgttccagtatggcctggtgtgctgaaaacacacattggtgctaccctgcttttccaataaagtgtgcctccctctggtgagcttcatgttgctctcatgttaggatcagcctctctagggaggcagccagggcccagcacccacctggaaagagcatcccctaagttctccctcacagattttttttttcaactgaaatttcaatcctcagttgtgtagggttcgggtccctgtgagggtgcctgatgcatggtcatccaggaggaggtggtagaaggggttgtgcctgttgctatggcaacacccagctgagatcatgaacctatttcatttgcagagagttgcaagatgaatcaatctcctcacccactccttctctctagcttcttcgtgtctctccacagccttctgtcatccaccctccccactcaaccttagaagttcttgctcagtgtgctctctctctccctcttcctctccccctccccctccctctccccccctctcatgaatccacatagcagttgatgttactatggtactatagcagattgttgatgttgcttctgaacccacacctttaaactttaatcagacatccctggaatgtctttttctttagacaggtatgctcagcctgttgactgcaagccacatatgtctcaggaaagctatgaatatggccctatgtacttgtagatggaaatgttgtttcacggtgcctaaagcttagatacccctagctgctccaacagaatatctgagaccatgtgatttataaagaatagatttgtcttttggctcatagttatggaggtcaaaagtgcactggcatttgaagagggccatgcttttgccaccatctgtctctgtgatcactacatcttctggaagggcagagtgctgtgttctcatgtagcagaagaagggagggcaaacatggcaaagatttcctccatcaagccttttaattacagctacattccatttaggagggcagagatctcatgagctgagccccttatcaaaggccctacctccaacacagtcatattggactttagtttctaagtccacagcaggtatattaaagtgtgcattgctaaggtttagcagagttcttatctagagacggtgttgggatctaaggctatgcatttccaacaaggtcccagctggtgctgatgctgatgctccaggcccaggggccaccttctgggaagctctgctctaggctgactttctccaattggaattgggagtgactagaataggcctttcttctttgattctaatgactggacgtattctttctacatcacatatttgttaaatccctttaaagtggcagacactgttaggtgcgtgatatctagagaaatgcaaaagcttcttttccaagaattcatggctatgtatagaaggaagacagtatatgctacgatgaacaatttagtattcaaagagtgataaaatagaagaggttgaataggcaattgtttctttgctcatggaagtaaagtatttaggtgagagtataattaatggtgattcattcccccagcctcaagactatctggagagaattggactttatctatataggttaatattaaaatctgatgtttgtagaatatttattctatttcagatactgtagcaagcactgaatatgttgacttttctgccctgtcacttcttataatctcaggcgagtaattcaacccttcaactcgctctccagagagaaatgggagtgctagtatctgcctcaaagaatcattgagaagattgagatttcgtgtcgatgtggatgcaacatctatagaaatcacttaataaaatgttgactcttatttccaataaactctgacctattgccctagaaaacaagctacagaattgtcctagagaacctcctgccatccaggctaaatcaccagcatttggccaagagaattagggacaggcttggttttaaatgtggggcttagaggaccccaaaatatacctggaaagctcctgtgacaccagccagaggaagcaagccttcctgtacattaaggacattggggtcactgagatgagacatgaggaaggctttgcaggatggttgagattttgaaggtgaattgtgtggatgttggagattggattgtaaagttaacaattaaaaacattccccagcaaggactacccctaatcatccttcagtcggggatgttaaagcagcaggcatagcactacttagccctagagagctagggttgatcctgaaggagattttctgccctattgcaccagggccctgtaccataggtgctgtagtactggacacaactttcttagtaggcagtgaagcactgctttctgatgtccctacaaaggacttcctcttcctttcttggtctctaaggattgctgtgtatttttctgaatgagggagacttccctgggtctttgggggtcctccaagaaagtagaccatgcccattcccagctgagctgtcttttctatctccctacccagctttgcatacagctgtgattgtcactgtgtgagagggcagagtctagcagtcttgttttaatcctttccccagctcatcagagataagagtgatagaggctctctcctctggggaggattataagttattctttgtggtaagatagacccaggaagagcttattaaatgataatccctgataaattccctttaatcacctatgccctcttagtcatggaaaaacccctacacattcaattaactctttgaaagacctttctcatccccttccttctctcccaccccttcccttcccttcccttccccaattcctgcttcctttccttccttctgatggcttcaggtttatttgtttagggtatgttcatatacttgtgtgttcatgtgaatgtgaatgctgcccttgtgggtgcttgtgttcttgcacctgtttgtacatagaggccagagatcagcctcaagtgtaattgctcaggtactaatcactctgagacaagtaagacagggtcttttactggccccaggaactttctggttagactaggttagctgtccagaatgccccagtgatccatctgactctacttccctagcactagaattacaggggcaaggctcagcaaaagtattgctaactgagctatcctaccatgtcttataagatttaaccagggccacccattaagcttactaatatttattctttcaacaaacatgtactgcgttcttactgagagctaagttggaatgggaacttggatccacctgctccttgcagttgagtgtcgagccttgtggtagagaatactacattcagcaggtacaggggagaggtcggtgaggtattgggataaagtacagaaaacccaagtgtggtagcctctgggaagtcttcctagtaaatgtcaggttcaatcatgctttgagtccaaacttttcaggtagaaaagcagaggcaggcaccccagagtatagcggcaacatgaacaaagaacgtggagctaggaaagaactcggcattcaagaagctatggtcttgtatttggcaggtgctggggagaaaacttatacagggtcggctgggctcagacacactagaggctttggccaggacagtgctacagcatattaaggggagatatataggttagaaatgacaactgccccccagctctgaagactaacaggatctccctggcagtagaatggcagttgtgcaactaaccacagaactggctgtgtcagctttccagattcaccaggtgtctgaggcagagaagaaactgtgaggtcagggtgcagagttggaagaacatcccatctgggtagaactctgagagtcaggaaccatcgtcctgctgacattgctactgtgaacgcctgcacctgtagctctgttctcagacatactccaagggaaacatgattagttctttctcttccccacccacaggcccaggtaacacagcgtactgagagaagaaagagaaaatctaggtgtgggttctgcctctttagtatattaaccaggagacatttagacttgcatacccttattgtgttctttttaaatttttttgtttttttattatatattttttaaagtttgagattataaggtatacattatttccacttccctttccttctcccaactcctcccatgtaccccactcctttattttctttaaaatcatagactcctttttatttgattttacacacactcatacacccatgcctgtacacaggtatgtatatgtgtgtttgtgtatgtgtgtgcttgttttatatgtgtttgtatgtgtgtgtgtttgtgtgtgtatgtgtgtatttgtatgtgtgtgtgtgcatgtgtgtgtgtgtattactaaatacattgaatacaacctgttccatccatataatgttatttctttgtataaaatttcagggctgaccattttttatcctcccttggaaagacttctttttccagctccaggatctagttgtctgcagttctttgtccagggttgaaacctctcgaattttcccactttcacattaacctactttttgatgtccttgttcaggtgagattttggcagtcttattggtaagacttgatgagtgtatcctctctaaaatttctgggagacacaatctcatagcaaggtttctgctcctctggctcttacgatctttctgcctccctcctctgaaataatcacggagccttaggtaatacgttatgctgtagatggatcaattgggtcttgggtccacatctctactttttgatcagttgtggttttctgtaatggtctctgtctattgcaaagaaacgtttccttgatgaggagtaagaactgtacttttcagcagctataaggataagcattattatgtagctagggattatactggtttagtaaaatggcacttgtaggttctccaccaagatccatgacctcagtgtccctaggcagttatctatatttctagtatcaggcttaccttggttgtgtttagcatatagggtgtagattagaatcagtatatctatatccttggtagagtatccagcccaaagtagatgcttaacaagaggaagtaaaaactacttttatctctttaatatctctttgataccttgaggtcaaagacacaggacaatattttaagatgtttcaatggttttcttagtgtctcagatagagtatctgcctttggacaacttaggtgtgttcttgtgatactcattgtctttaaccctatcacatcacacctggatgaactcaaaagtttcctacaagtagaagacacacaaagcaattctttccaccattctcggattgaggaagtaatgaccattatttattatctgtattctgtttcagatgtatacctcaagtgattaaaaatgttgggttgaattgagctttgtatacatgtgtgagtcaagggaagaatcaacatgaacttctatgagggcagcttcagagtgagccagagagtatagctcaatggatgagaaagatgctggaagtagatgattagaacctgggattgagggcaaagtgaagcatattgagatggaatgggaatagatgtctcacatagacacctactgaaaggacagattcccctttagatagtctcgggcacaggagttagtgatggttataggatactggtgatgtacaccaggcttctcacaagtaaaggggactagcatttagcctctgacttcccctaaattccacagtagccacaagaggggaagaagtggtaccttgtgcttccttgtagcccagtgctacaagtatggggaactaatctgtcatcagaccttagagagtttcacctagctcttctcatgtctcaggtgataagcagacatgtaggtttcttgcattcattaatcatagcaccagtacaagtgaaatttaacatgctttccagagatgctgacttaagtcctggagaaacaaaaactcatgaaccttgggcccttgctttcaagctgttttttccccttttaatttagctattaattttacatcctgattgcagcctccctctcctcccagaaccccccacccacccatatagcctcttctcccccaccccctccacctctcctcttagaagggggaaccccatctctggacgccaccctggcacatcaattctacagtggcagaactagggacatactctcccactgaggccaagcaaagcagcccagttcttattgaaaagcaggaggttttcccgggaccacaaaacccaaaagcaattgctctggagtttcttcaggaagccagcaaggctaaccagcatcacctagggtttggtgcacagttgttaattaacccagatatcttccatgataaattaatttaccttctgttcagaatctggtgagaaggaaaaatgaaagccaaggcaaatgattatcctgacgctttttccttgggtgtctgcgctaatatactgtgaacatttgagctagctgagtgtacctgctgtatgtcaacagagatgccattttgcaagtgatctatttatttccagagaagaaaactcatataggcctgtgaagcagaataatgctaggagatttataatcttttattagtcaatactattattaagaatctcttgtttgtagagtaaatatccttggtattggtagaagtacatgcagaaatatgagataaggttctttctccaaaaagcatttagccctagtgggaagggagggacaatatgtaaaagagacagaacagaacccattttaaaaagatctatgagtaagactaaatgctgaagcatagcacttaatgctgaattttcagttgcaggtggttttttttttcccttactgacttagcttttttatagataccaaagcccttgactacaattttcctttcccgttgatttgatgcccatattcaacatactcagacatgttgaatgaatatacatgctactatgaggtatacctaattgctgagggaaatcctggagtggtgtacttaggaaaagccttatagatccgaggagagtctctaagtatgaaaggacccaagatctggtagaaccaggaataggggaaggagcaaaaccagaaggactcttggacaatggcagatctgtagttcaggctgccgatgagagtcccctatagcctgattcttcttgtcttatactgccttccttgctactgctgatgcaactatttgtagacttatcattatcatctatctcccttccttggaatgttttttaattagccattagagagtttctttttccaaattcagatgaaagaaaggtcgcctaaaactttgcttgatatctttaccctttctctatttaaattgcagtattcatagtctgatgtcagtagccttgaccttaagcagaggtgtcttcctcatgtccttaaactttatggagtctccagatataatcttgtgataatactaattccataggaaatactaatgggacatgtggtcatatgcaagattaagtaccaaaaagaatatgtagaataggggggctttgcagagtggtttggaagttagaagcctggtattctagttttacttgtgtatatgttagacttagctgtattcttcaggacagttcctgacaatgcaggccaagagggacaagttagctgtatcaagctcaggtacctttgactgaccatactccacagagagcattagttacttacagcagctcctggctcaggcaggtgctgccctgggacttgcttgtgtgtacttggcatgtttatgaagtctgctacaggtcctgagacataatgaaatgacttgcctcctggaactcaggaagaactttctgtcttctctccttccatctgctttcccattctcctccttgctgggggctgggagggtagctggggcttgcaggatcctgcttgtgtttgttttccctaagaacagtggttctcaaccttcctagtgctgtaaccctataatacagtttttcctgttatagtggcccccaaccataaaattattttgttgctacttcataactgtaatttgctactgttacaaattgtaacgtaaatatctgatatgcaggatgtctgatatgtgacccataaagggatcacagcccataggtcgagaaccactgccttaaagatggtgacaatgtggatgggattgatttcaggcattctgatgctaccggataacaagagtcagagtctcatgaaactgagtcactacagctctagagtgtggatacagatccttcagtaatttgtatcctcaaaggagtcattatgcctctctgggtttcagtttcttctagaaaatgatagattgggccatgtaaactcataattttcttcctggtatgcagggaaccagcttcaataatacatgggtgggattcagaatatccaacagcttataagctatactgttcattgtgtcattttcctaaaacacggggtggcaaaagcatccagtggctctgttgatagaaatgtcaccaaacagctatgattcaggtgctgtcagcctgttaaggttagtcaaagccctggcacggacggtataaaacatctcaagtcagattccttagaaatcgactctgggatggaggtgcttgcttactggatggattatagaggaatcagtgctaggagattcctgaaagaatgggagaaaagtaggtaggttggggaacttgaggcagagatgtggtctcagaagtgtttgtatcagccttgttcaataggcagttccaagtgtgaatgcataacacgagcgtttcatccagcctgacagaggatggaccatcaacgcttcttcagctcaggcagctcttggccacaagtcctcccattatcaccacaagggtatgaagttcatgttgaggctggtcttttatccaggaacaggcttctaaggaggggccaagaatgaggctatcatgagagctattcagagatagcacccacagcagctggggatgaatattcttgtaggttatcggtagaaagtctggccaggggcagcacaaactctgtcacacccaaaccactgactcctatgggtggtttaacatatggaagggagcattcacatggcactaaccaatgatgagtcctgcctagtggatacttagagacgtcaagacttggttacagttaagaaaggaaaatggtagccagaagaggcccaagggctactgaatactgatgtagtaatgtacattatgaaaagactcatctaagaggtatcctgtgagttttattcttttttatgtttcagaatatctacatgggatcgggcaggaggaggtactgcatgatagtatcattcattcaaagaaagcaccccttttccttcttgtagaccacacctcactttcattcatgggattctttctcttaagacacatcatttcctttctgttgaccagagtgaatccatcacttgcctgagcaccccactgtcccttaccaacactggcctcatttgcaattatacttttctgtgtgttttacctgttcacatgaatattcctattatactacaagttccatggtgagcaagactgtgactgttcttctgttcgattatctttagaggaaagaatttgctccttggtaggtaattcatgaatgtgtaggatgaaatcacttgagttccaaaacagaccacctaagtcccttgaggtaggatggaggccccaaggcatagtgttaggaggaaggagggacaaggaggaatagttacttggtgaggaattgtctgcctggttcgggaccttaacagaaggtatttgttgagaaattgcatctgtattcacatttcacaatcatgttccttttcttaggagtggttagcattggctgagacaaatggtctgtctcttttggcagtctggtagctgctccaccaccttccaacctgagctattagtaattagtgaaattgaagatctctaattaagatgcagtcctgaggccagaggtttttagtctgaagctgtttttatctttccatgcaaaccatttggaaattctggagacattttcatttgtcacaactcagggattcccactggtatctgttaagtggaggccagggctatgctaatacctgacagagatatgcaaaaccctgacagagaatccccctgacctcaaatggaagctgtgcttcggctaaggaagcctgcaatctggtttgggtcttctagctaggactgcctcaaacctgggaataagggggttccccaaagactgtttctaaagaattcaggaacctgctctttctttcccaatactttcagccataagcatggcatgggggagttcagcctttttgctcagagctgctctgagaagcaagagcatgacttgcaggtgcttcagcatccttttcacagagctgggtaggaccctgtaagagttctgaatgtatgtcctccgagaggaagaactataaggcccctttctccttgctctttccattcctatctttctctcccatttggctcatcctgccctatcttcctgcatctctcccaccccacccccgaagattaatgtgataattgccatgtgtgcctgtttacacagggagtgggtgagcttaccaccctcaatcaggcaggttcccaaagaaacgcagtcccacgatgtcaggactggtacccgctgagcactcctgtgcaggtgggctgccacccccaaacttctttctctgtctgtcatcatcgttgtcatgtgcacatgtgcatgtgtgtgccattcagtgaagcgacaggtgagaaggaggagaaacagctagactagcatcaggagaagggccaggcagaggaattgctatgcattataggcacatcagcccttaaaattagaggacaatgagccaaggaaaagctctctctaatgcctgtcacgtggtaggcctgctagggtactccagggaaaagcaacgggccaaggaggaaagggttcagtaggagaatcagaggctgggatgttcacatgaggctgtttgcaaactggtgaagccagtagaagccagcagaaccagtatgcctctacctaaattgggagctttggaacaatggaaggtaatggtacagctcttagacccaggccaaataaaagccacaagtctttgggaggttacttgttcaaatcccaatgtcaagttcagctggagttctaatgtctaaggtcaggagaatagcatctggttctaaagggcaaacaatcaatgtgaggtttgagattgtcatatgaggacatgaggccagtgattccgccttttcatttccgctacgcccatctcagatctagcaagtgggaggcacctataatccaattgaggtgtcttccatacctgggactctgatccacaagcaaactttctccgggtatgatatatcacacagaccaagctttgccagccactcagacatccttcagtcccaagttcgtcattgtggcaagtgttccataggtgtgaaatgatgaggctgttctctacgtgacattcattgcagagaaaggcctagtccacagttgtttcccattggaggtctgggtgggaaagattctcctatgagactatactggggcaggaactagcagatgatattttggaagctgcagtctcatgcgtcaggattttatcggaagaccttagcatggctatctcatgttcctaaaggtaaaaataaggtttgagtatcctagacgcaaaagtgccccgtgagcattgcaacagtcatgggcacagtgacgagcaaaagggggagctccttttctccagaccgtgacctcctatcccctctagagacagtcacctggacagcccaagagaatgacccggctctggccacactgccaatggtaccctgactcacagcatcaggatgcttcatgccttcagagttgttgattgcttcatttttttttaaagtctcaaaatatacacactaaaatatagacatctctcctacactggacaattttaagtttttaataatgatgaatcagaaggagatgaaagctccatttagcatctgaaagaaccttgccattttgaaggagggaatcgtgagcaaagtcctctgcttgcccactttctgatgaggagtgtccccttcatcccgttggcttttggaccacaataaacatgtgaaggggtgggaagccacctggtcagaaaaggtggaagaaggaggacaagaaggaaactgcttgttaggagttgagtgtggagggaattcagcagtgatgttgaaaggccctgagtgatggcggacaggcgctatcaagcttctctcttctgcaggaccttttgagctgccagtcatttccttaacccccagaacatcaagctgctggggctgatgtcttcacagctatcatttcccccttctcttcctcttcttcctttttcttcttccaggatgccccattgctgaaatagatgacgtgtgtaattcagagaaaatttcacagatggataaaatgttaccagaatggatttgtattgatctatttttaacaagcgtgtcgtcatcttcaaagtgtggccatttattaattaattacctctgtgtatgccaaaatcttcgtcatatcccagatattaaaatactcagatagttaagagtaaacccaaagcattctcagccaactctggctggaccagtactgtttgtcatgtgagttttgtagaggtattaggaaggacatttcaaagtcttagtcagtaagggagagattctcttatccttttgtctcatggaatatatcctctgatgtattcatagagttgtttttgtttgtttgttttttttgttttttttgaaagagaagggttcaccaccaaggaagttaatgaaatggtatagtgaatgaagtaagcaatatggctttccaccattcttctcactagctgcgagacatagataatctgccatttccctaactttctctggttaccaaacccattttccacaaaatgccatccttgccttctacaaatcacagcaatgcagagtacgcagttttatatagttatataggtttcactctgtagccgccctagctccctttcaaccacagctcagtgggagatcagagatacctcaaaatccacaatttcaacattgccactgctgatattgacacttttatgggcagctgagctctgatccaggtgcttggtgtaaactttgtccctgctgccaaagaacactgaaggagggactattgaaatcttaaagcaagtggattatattcatctggagccactgaagttaacaagactttaaagatatattagagtccccataatcatgaagacaggcagagctctgtggtgagcatcaatgtctaccttagctcacagcaagatgcacacctcagtcatctcagtcacacccacctgccccgttcttcacaccccacttggctctcagcatatggttctgctgcatcttctttctgatgatgagacatggctttctctgggatttgccctgtgtcctctctacttgtatctaaccaagactccggtaagccaaagtctctgacactgaagtaaggcagaactttgttccatacagtttaattttttttcatgtagtttgtttgtgtcaaattttgagtcaactttattccagtgatctgatctgtgatcagtgcagggccagaacaaaaggcacaaagttgccaaaaggacttgggattatttttaatggaagatttgactgtccagtgacagcggccatagacaatccacagataagttatgtggcttgacattggaatggggaaaaaaatgagacaaactggagagggaaaaattgattgggtttataaaagtccacaagaatcatgagaatgaccactttaagatatatttccagggtttcgtagtaaggattaagaggcacatagaaggcatggatggtgggccagcactgcgccacagatgttctgagctctggatctggcatttgatcttgagggacccatttccccaataaattagggacaaaatatccattgtgagtttcaaatggatattgaaagtgattcatgaagggtggggatagggagagtgttcaaaggtctgcatgtgggaagtacaaatccagaaaatcccttcagaaaaacttgagcaggaagaatccaatgaacaagacccattgttgagagacagcacctcagtattcttggagctcaaatttcaagggtctcataagacatggcaagtcaccctttctcagttctgggcgcctcagcaactctgcatccaacttggatacaagaatccataatctatatttctgtgctttccccccacttctttgtatcagcaagaggtagaggagaagggagcatgatgagagagcttgagggagatcagatctcataccatcactctgaaaaatctagacatagtctttgttctgcccagggctttgctggggccagacctgggccagctctgtattaccagcttgtgatgggtaaaggacagctaaccccagaactgggtaacataaggaagagcctaagtcgtcctaaggatcccttctaagggcttttctaacacccatggggtagggtgacaagttcagcctgcccttggttttttgttttttggttttttttctctttttctatttatctagcttaagagtgcaaaggatgagaataaatgttaccaagaactataaagccaactcacctttttatatccttggaaaaaaattttttttgatttttccattcagttttcactctttctaagtaagggtattagaattctctcactcaggatattgcagagatactgatgtggccttcactaggcacagggtaaaatgtgagttgtcttacaataaagtggagtggggttgggggtgaggtaatgttgaactgtatcacgccatgactgttacatcacccacggtatggaacctctggaatgcaagcctcgctcctggggtggctttaaatcttacgaaaccatttttctttctttcagaccaatgatgccttaggagccacctggaactggctgtacttcatccctctcatcatcatcggatccttctttgttctcaacctcgtcctgggagtgctttccgggtaagccatacttttttaaatctccttttctgagctgctatctgggggctaaaacctcctgattgaagataggttcactcacttacctgtcacgtcaaagacactgggcagacccttgtgccagtgttatcccagctatgtcagtgcggtaacagatgattgttttaatcaccttgattatttttagactttaaaacaatctatatgttgtgtacagttgtaaacacagtaccttgtgagttctttgacccattcatatttccattcaataactctgtgtcaagcactgtgctggttgctgtagacatatagttaaggaagacagagactctgtcctcaaaaaaaaaaattggttgctttgcagtatattggacatcacattacatgtttgtaannnnnnnnnnnnnnnnnnnnnnnnnnnnnnnnnnnnnnnnnnnnnnnnnnnnnnnnnnnnnnnnnnnnnnnnnnnnnnnnnnnnnnnnnnnnnnnnnnnnnnnnnnnnnnnnnnnnnnnnnnnnnnnnnnnnnnnnnnnnnnnnnnnnnnnnnnnnnnnnnnnnnnnnnnnnnnnnnnnnnnnnnnnnnnnnnnnnnnnnnnnnnnnnnnnnnnnnnnnnnnnnnnnnnnnnnnnnnnnnnnnnnnnnnnnnnnnnnnnnnnnnnnnnnnnnnnnnnnnnnnnnnnnnnnnnnnnnnnnnnnnnnnnnnnnnnnnnnnnnnnnnnnnnnnnnnnnnnnnnnnnnnnnnnnnnnnnnnnnnnnnnnnnnnnnnnnnnnnnnnnnnnnnnnnnnnnnnnnnnnnnnnnnnnnnnnnnnnnnnnnnnnnnnnnnnnnnagaccgtgaacaaaccatttttattcaacaaatggttaacgccacagtagttgtaaaagctgaagtttaatggcctccaagggaaaatgataataaacaggcagactgacacttcttctgagctcaagaaaggattgggaactagagacagcaaatattcctgagagctggagtgtacatgctattgaaaacaagagagtgataagaaatcatactacctgctcagtctctagataatactggctagtatctgccccctgaacacattaggaggtcgaggtctgagccatcaaaggttagactggtgacactcactgcatcttaaggtggtcttgacaatgtcatggaaataagaggcctaagtgacagttcctaaggtgagtgtcagctccacgacccacttctgtttctcagaaaagcagcaatctggcaatagtttagaggactctactgaggggattctgtcttaaaaggaaaagatctgtctttttgacagtctgatgaggtcagagaaacaggttccattccgtcagccccccagcaaagctcaccacgctcattccctatggctatcgcaataaacatcacaatccaggtagcataaaatggacggacatttaatcctctggtagtttttgagttacaagttccagatctggcaggcccgtgctccctccaagggctggagagaatcatttcttccatctcctacccggctttggtagatccaggcatttcttggactatcaccatgactacacgtcaccccagtctctgcttcagggctcacatggcctcttcctctccccggtctgtcattgccctccgtcttgctcttataaggatacttgtgatttgatttagaatcactgggtaatctagtttgatctcatcttttgaatacacttaactttgctggtatctgccgactcttttttccaaataaggtaacactcaggagttccaggaattagaatatgaatggtcttttgaagccagttgccattcacccactgcactgatacaccactggccccagcagaggatgcagagtttccactgccttgctcataagtgtgagcacacagccagggatcagcagcattggagggaaatgcccagtgtgaaggtcccttagcagcataataaggagacaagagacatgcatgactgtgagcagctcaggtagtaaaagataacgtacaagctcatgtctgataccagcagagatagagacagaagttcatacataaaataatagcttatgatgagagggtgttgagatgaggaagggctgtgggaactatatggaacatacacttgatgtgaaagcagtacaaagttgagttaatgtcaacatgtaatcaaaccaaaaagataataaagttggagtgagaaattaagggtaccacttagaaagtatggttaggggagagacaagagacagagacagagggaagcacagacagagagacagagacagagagagagagagacactgatagactcgaagagcaaggaatggtgacaggcactcataaccccagcccttgagaagcagaatcaggaaaaatcacatcctgggctacatagtgagaccttgtttcaaaacatttacaattgagccaacgctttagtaagaaagtttaataaagagaacaatgaagcaggaagaaagaattaacgtagaaaaatatgagagaagttcccagaacaaaagactcagcattgccagatttaaataaaaccgtggactcgtgtgcaaagatgttatttctggtgtatttcttggcagtgggcatgggaagcacggggacatcccaagctgggaatttagataggtaaactgttggatgcacccctggcatgtgctgtagcaataagagtaacagataccgtgtacacatggacgggagggtatcttaagaatgtttcagtgaaaacaaggagacaatgtgatatgttatcacatttgtatatgtataaagcacagttggtaaaatgtgtttaaatgtaaagttatgcatttggcaatattgtaacagttcatgtggcggaatgcagatgtgtaaactaaccattaaaatacccaagcgttaaaaagtacactccatataggaaaaccacaccaaggtaaattgctgcgaacttcaggccatcagagaaaagaatgttctgaaagtttctagccattgggtatatggctactaattggtataaggaaacagaatgccagggagtttctcagtggcaacactgaaaagcagagagctcctaaaacttcccaacagcaaaacggctttcacgatcaaatgctctgcctacccagagtgccagttatctgtatggacagaatatggacattgtcaggtacttttgggggaaaagcttgataaagaacacacgtcactaagaataaggaagcaagtaagaaagcaaggaatggagctggggagatggctcagaggtcgagagaggaccatgtggcagttcataaatatctgtaaactccactcccaagagatctgacatctgcaggctgtgtgcgcacacacacacacacaaacacacacacatacacacagagaaagagagagagacagaaagagagagaacaaacatatatgtagacaaaccgtaatacacataaaataataaagtaactttcaaaaggaaaagacataaagaaaaccatggtacgcatgtacacaagtgagtcagtagaggacaaagacaaagggattgagccctggtgttacagtgtaatggaattagggtaataactctcagtgacctagaggacatcatcatccaactaacatagggcgacagaggtcctcacatgctatctttagaaaacaagtgaaactaataaatgccccgttgtgttatattctgaagggctctgtgatttcttttggtccaactccccccccccccacacacaaaataatgtattctctctctctctctctctctctctctctctctctctctctctctctgtcagcatctctgtgtcgcctctccccatcccattaccccaacttaagcacttaattccacatcatgcacaagtgttactcctaacgaaatagaaacacagcaagtcttctgtgtagctcagctgacaacctggttttcactgttgatgctgaagcctgagctagtctcttgcaatgttgcaattgcctttataggactggagaatacctaataaaaaatatattaaaaaaaaaagactggagcaggggaggctaaccatggggacaggaagagggtatcaaaggccaaaatcttaggttccacagtcagcaaatcatcaagcagttcctaaaattgaaagataaagaaatagcagtgtcttaagtataatatttagaaaatgtgaaacgaataccagaagaaacagaagagttgaaagtggctgtctctggagagggagattctgggctggggaaaggtgagacagagggctgctagtttttttcattatgatccttcaaaacctgtttgacttttaaagttctatatgtacatctttgagaaaaataaaaaccttaaattttgaagtaaaatgatcagaaaacaagtaggatggacagacagagtaaggacacctatctaataccagcatggttggattgacatggagggaacagacacaggataatcaacaaggaaataattgcgccagtgttaccagtgtcacactaagaaacatggcagaactctgtaaaatggtcaaggagaagaaatggtggccactaggaaggggtttgtaactgtctgtgactatttggttgttcccagttctgtgggcatcaattcctctctggctgggagaccgtcttcagtcagaagatgccatgctactggtctggctgatgcctctttactacctgaaacctaagaagtggtgttggcagctggcaacagctggtgtgaaagaataaattctgacatttaaaggagtgttaacaagaggaaccttgcgagctggggctgaactacttttgccttggttttatttctgtattctggtgcttcgtacattgttcagcatttagaggattttcactggtgtctacagagggctcagtaccactgggtcctgtggataggaggggtcatgggctttctcggctacctgatctgtgagccctggcctctagaaaggatgaaacctctccgttggagtggagctttgtttggcattcacaagttgagcctcctgggatgtagctttgaacattttgtctccagggaacagggttctgtgacctgtgagtgtgctggatgttatgtgcccatgtgattccaggagtggagaatcaacaatttctgtatatataaggaagatacacattgctccctacattgagtaagagtcccccgggcatcaagtatggcagtgactgaaagccccatcccagaggttgagacactgatgaaaaactgtgaggcatgtttgttggcttcatatttaagaaggaaagatggatagaagcattgtagcatttttacgtgtctcagaggaaataggatttgatgaaaaccattagcttaggcttgaagagaagcagagcttcctgtctccatggcaacaaactagggctgcataagcacatcctgaagtgctgtcaggggctacagggcacaaagctcacacaaacagaaaatgaccctgagctattccagcttctccacctattgcttccagggcttgtgagagaggaagacaagtgtaggggccaattgtgctatctccaaataggggcaaggaagttaggccaaggactacttacagatgcactggggagcaatgagaaggctcacatatgtaaaatgtcttgtagttttcagagcaccttgcttccaagatcttattcatttcttgccacagcttgtgttggcacacaacatctttaaagacgaaggaaagagctaaagaaccgatctccgacaagttcttggcagaaacaggccagaggtcattgtcgctcaatctctggttaggtgcttatcttattatcccaggtagccttcagaaaggcttcctagagtgatgtcctggccacagtacaaagggtaggttcaaagtttaatgtgtacatgcattagtcacatgcttattcttaacacactggtgtctatatatgcaatgttaccttgtacatatgaagaagaagaagaagaagaagaagaagaagaagaagaagaagaagaagaagaagaagaagaagaagaagaagattattccaagacccactagcaagacctttttgctctaaggactgatggaaagaggtgaactgttaataagagaggaagggttcttctggttgcatttcttcaatgaccagagtagcttccatagcaagcaaaaagacaggtgcctatcttgctaccggctcatttactggctggatttgacaactggataccattcatcaaacctttgtttagtatttgctgcacaaaagacactttgttctcgggttgcaaatctgaataagacaaggtgattttagattaatgaaggaaataatttaagacatctaattgattgatgttcccaggatttgttctttcaaagtgtgtctgagccacatagaattgcagttacttgtgcatttctgctgcccctcttcaggtattacacccctcccccactgtcaagactcctttctcattaaccttctctgacaatgaaacaaagcaaaaataaaaggcatgtaatggggtctaagttctaggatcttgagattcaaattttgcgaaagttattacttaagatttttatatttatgttctatagtttaggttcaagtaattttgcaaggaattattaagtacataaaagtgagtaagacctttatcttggacttggtcatagaaacagactaactgatgtgtcttcaccttggatatcctgactcatctgtccttgcacattaggaggtgggaactgagccttttctgtgtctgacttgagacagaaatagttgctggtcttataaaataaattttccagtccaagttcagcagtccagacgagatccgagtagtgctggtggatattaattgagatgtgtctgatctctagcagacacgtagacacagttaaaaatcactgtgtgatttaactacacagcggtgttactagaatactaaaactaatgtcaatcaggagacatcactcagtttctcaggcagcagttactgagcatgcgctatagtgttacccagggtctgtgggtatcagattagacaagtccagagaactgctatccttagggagctcataatctaggtagagagacagcaacagggcaagcattaaaaataggtggatggcaatctgtctcagtaaggaaagatgcctacccccaagctcaacaaccagagtttgatccccaggacctctgtagtagaagaaaagattatcccagattatcctctgccctccacctggatgctgtagcaggcacatgcgacttccctactaatacagacataaatgtgattacaaaaacttagattagagggggaccaagatcaaatacaaatagctgaagagtataacacttctgcaaatttttgagagtggctaatagttagctagaacagagggaataaaaaaagacctttcagttgggttaaaaattacagagactcttgagagagtagggaggcaagctggaagcaagagttccagagagatgcaaggaccctatgagttcagtgcagtgaggacagaaatgatgtggtagggtgagacctgcaggatttgtgactgtaggacggtggttctcaatctttgggtctcaaccccttgtgggaggggtcgaaggactctttcacaggggtcacctaaggccatgagaaaacacaaatatttacattatgattcataacaataacaaaattacagttatacaatagcaacaaaaataattttatggttgggggccaccacagcatgagcatctggtatcaaagggttgtagcattaggaaggttgagaaccattggtgtagtgtctgggtgtcactgggataaaaatataaaagaagacaatctcttggctatttctggatttctgaattgagcttccaggtggctgggagagaacagagaagcaagagttaggttttgagggaagtgggataggttttggatctattgagttgagagaacataacacactttctgccttttggctagctcacagcagtggagtagggtttgtttcaggttgttatttttaaagctgtgatttattgagtctgtgctgtgcaccaaacatggtgccaattctacgacatacattgtctcatttaatcctcataaagatcctatgaggtattgctttcttctcctataaatggggaaatggtggtagggagggttggtagcctgcctacagaaacaaagctgttaagctgaaggatcagaatttgttttaaggtctgctgtggctgaacacctaaccctcgtgcatatctgccatgcagcacctatgatttgtccagaaagatatgttattgtctaggatccaggacagtgcaatttgatgaatacagaagggactatcagtggttaccagtacaatcctgtagacaaagactccatcttaaatcttatcaaagcaattacaacagagattgcataaagcctattttgagtagaaagatacttgtgtgaccatggggtaatatatgaaactaaatgaaaagatatgcaattctttaagatagttgtcaaaattgtaccttagagtatgataaaaaattctatgaggaaggaactctatgttatctttttgtacttggctcctggcctccatactacacaggaggaacctcacatagattataaataacttatttagtgactgggtgtcaggtcacagctaaaacctaggtttctttggttcttaaccaggaaacttttccaattctgtgccatggctataggtagaagtaaacaaggtttaccgtgtaaaccttgcatctgggtttttgtacagacgttgtacaaagatatgttgtagaacaacatatctttctgctcttatcattttgtggctatatgatattaattaagtctttttacttttctgtatcttcacttatacaattgtggcttaagatgcatatattcattatatacatgattattgaggaaatcaggttaggttgcaagtgctcagtgtttagtgtcttgagataatcaatacttaccactgggaaggaacgctctgttttacttaccacctacatccattgagccaattagcatgatctcaaagacttcaaatgttattctaaggctgaacatccgtggtaccctacaggtaacaggagaaatggacggggtccttatgccccacatagagacatcaacttaaacattcgatcatttgcattcccttggaaatatccttgcttttctaccctctgtgatctggagtaagcctcagttcgaattttaagtatcctttcacagtatattttaatattatttctcttttttattttttattttatattaatggcatgtttattagtactgtattggtaaggctctggcagagcctctcagaaaacagctaaatcaggcttctgtcaacaagcacttcttggcatcagcaatagtgtctgggtttggtggctgcaaatggaatggatccccaggtggggcagtttctggatggcctttcctttagtttctgctccactctttgtccttgtatttcctttagacaggagcaattctgggtgaatatttttgagatgggtgtatggccccatctttaaaccaggggccataccataacctctgaatatggtctctacaggttctttctcccctttattgggtatttcagataatgctatccccattggggtctggtagcctcttgctttcctggcatctgggactttctgatggctatctccagttccccatcacccattgctactcgcctctgttcagtttcccatccatacatctgggggaagaggatcataatttcacccattacatgatgttttccaggtccatagtcctgtccctgttctgcagtttaaagtccccccccccgatattcctgtagcactatgctatctttatagaattgattactaatcgtaatagaattactttatagcatttaatactaacactaaagtcaagtgctaacatttattgagaacttgtcatctgcctgccactgtgctaaatatgttgtgtaaagtatttcacttaatttttatagcagctttgtgaggtgggaacaattttcaactccattttacacatgaagaaatggaggctagaaggtcagagtcttgactaagcttgcctccctaggatgggatgtcgtccttgcactgaaattacaaatttcactgttgcctattgggttttttttttctttctcatattggttatgcctttctacacagttggatctgtatttgtatcctagtaactttaaattttttttttctgagttgaagaaaactgagctatgccaggacctccttggggaatgccatgcccctttgaatcccacagatattgaaatagcagagaaatggaagctctgatatctccagcagagtcacagattttggagatcttaaaggagtacatgccagttgaatggttctcttatgttcttgttgtttgtttgtactgagtgtgagggttacaaaagaggagagtctcctggactatttctgagtttctgagttgtttggtactgaaggttagaactacagtcttactaagcagtcactagcactaagtatatccccagacaaggatgctcattttttaattttatttttttatttatttacttttattaggtattttcctcatttacatttccaatgctatcccaaaagtcccccatacccacccccccaatcccctacccacccactccccctttttggccctggcgttcccctgtactggggcatataaagtttgcaaggccaatgggcctctctttccagtgatggccgactaggccatcttttgatacatatgcagctagagtcaagagctcaggggtactggttagttcataatgttgttccacctatagggttgcagatccctttagctccttgggtattttctctagctcctctgttgggggtcctgtgatccatccaatagctgactgtgagcatccacttctgtgtttgctaggccccggcatagtctcacaagagacagctatatcagggtcctttcagcaaaatcttgctagtgtatgcaatggtgtcagcgtttggaggctgattatgggatggatccctggatatggcagtctctagatggtccatccttttgtctcagctccaaactttgtctctgtaactccttccatgggtgttttgttcccaattctaagaaggggcaaagtgtccacactttggtctttgttcttcttgagtttcatgtgttttgcaaattgtaacttatatcttgggtattctgagtttctgggctaatattcactcatcagtgagtacatatcatttgagttcttttgtgattgggttacctcactcaggataatgccctccaggtccaaccatttgcctaggaatttcataaattcattctttttaatagctgagtagtactccattgtgtaaatgtaccacattttctgtatccattcttctgttgaggggcatctgggatctttccagcttctggccattataaataaggctgctatgaacatagtggagcatatttctttcttactagttggaacatcttctggatatatgcccaggagagggattgcgggatcctctggtagtaccatatccaattttctgagaaactgccagactgatttccagagtggttgtacaatcttgcaatcccaccaacagtggaggactgttcctctttctccacatcctcaccagcatctgctgtcacctgaatttttgatcttagccattctgactggtgtgaggtggaagctcagggttgttttgatttgcatttccctgatgattaaggatgctgaacattttttcaggtgtttctcagccattcggtattcctcaggtgagaattttttgtttagctctgagcccatttttaatggggttatttgattttctggagtccaccttcttgagttctttatatatgttggatattagtcctctatctgatttaggataggtaaagatcctttcccaatctattggtggcctttttgtcttattgacggtgtcttttgccttacagaagctttgcagtttcatgagggcccatttgtcaattctcgattttacagcacaagccattgctgttctattcagggattttttcccccgtgccaatatcttcgaggcttttccccactttctcctctataagtttcagtgtctctggttttatgtggagctccttgatccacttagatttgaccttagtacaaggagataggaatggatcaattcacattcttctactcgataaccaccaattgtgccagcaccattttttgaaaatgcagtctttcttccactggatggttttatcttccttgtcgaagatcaagtgaccataggtgtgtgggttcatttctgggtcttcaattctattccattggtctacttttctctcgctataccagtaccatgcagtttttatcacaattgctctgtagtacagctttaggtcaggcatggtgattccaccagaggttgttttattcttgagaagagtttttgctatcctaggttttttgttattccagatgaatttgcagattgctctttctaattcgttgaagaattgagttggaattttgatggggattgcattgaatctgtagattgcttttggcaagattgccatttttacaatgttgatcctgccaatccatgagcatgggagatctttctatcttctgagatcttctttaatttctttctttagagacttgaagttcttatcatacagatctttcacttccttagagtcatgccacagtattttatattatttgtgactattgagaagggtgttgtttccctaatttctttctcagcctgtttattctttgtgtagagaaaggccattgacttgtttgagttaattttatatccagctacttcaccgaagctgtttatcaggtttagaggttctctggtggaatttttagggtcacttatatatactatcatatcatctgcaaaaagtgatattttgacttcttcttttccaatttgtatccccttgatctccttttgttgtggaattgctctggctaggacttcaagtacaatgttgaataggtagggagaaagtgggcagactggtctagtccctgattttagtgggattgcttccagctcctaaccatttactttgatgttggctactggtttgctgtagattgcttttatcacggttaggtatgggccttgaattcctgatctttccaagacttttatcatgaatgggtgttggaccttgtcaaatgctttctccgcatctaatgagatgatcatgtggtttttgtctttgagtttgtttatatactggattacattgatggatttccgtatattaaaccatccctgcatccctggaataaaacctacttggtcagaatggatgattgtttaatgtgttcttggattcggatagcgagaattttattgagtatttttgcatcgatattcataagggaaattggtctgaagttctctatctttgttggatctttctgtggtttaggtactagaagtaattgtggcttcatagaatgagttgggtagagtaccttctacttctattttgtggaatagtttgtgcagaactggaattagatcttctttgaagttctgatagaactctgcactaagcccgtctgattctgggcttttttttttttttttttttttttggttggaagaccattaatgactgtttctatttctttaggggatatggggatgtttagattgttaacttgatcctggtttaactttggtacctggaatctgtctagaaatttgtccattcgtccacgttttccagttttgttgagtatagccttttgtagaaggatctgatggtattttggatttcttcagggtctgttgttatgtcttccttttcatttctgattttgttaattaggatgctgtctctgtgccctctagtgagtctggctaagggattatcatcttgttgattttctcaaagaaccagctcctagtttggttgattctttgaatagttcttcttgtttccacttggttgatttcacccctgagtttgattattttcctgctgtctactcctcttgggtgaatttacttcctttttttctagagcttttaggtgtgttgtcaagctgctagtgtgtgctctctctagtttcttttttggaggaactcagagctatgagtttccctcttagaaatgctttcatagtgtcccataagtttgggtatgttgtggcttcattttcattaaactctaaagagtctttaatttctttctttattccttccttgaccaagatatcattgagaagagtgttattcaatttccatgtgaatgttggctttccattatttatgttgttattgaagatcagccttagtccatggtggtctgataggatgcatgggacaatttcaatatttttgtatctgttgaggcctgttttgtgaccaattatatggtcaattttggagaaggtaccatgaggtgctgagaagaaggtatatccttttgttttaggataaaatgttctgtagatatctgttaagtccatttgtttcatcacttctgtttgtttcactctgtccctgtttagtttctgtttccatgatctgtccattgatgaaagtggtgtgttgaagtctcccactattattgtgtgaagtgcaatatgtgctttgagctttactaaagtttctttaatgaatgtggctgcccttgcatttagagcatagatattcagaattgagagttcttcttggaggattttacctttgatgagtatgaagtgtccctccttgtcttttttgataactttgggttggaagtcgatttcattctatattagaatggctattccagcttgtttcttcagaccatttgcttggaaaattgttttccaacctttcactctgaggtagtctctgtctttttccctgagatgggtttcctgtaagcagcagaatgttgggtcctgtttgtgtagccattctgttagtctatgtctttttattggggaattgagtccattgatattaagagatattaaagaaaagtaattgttgcttcctattatttttgtttttagagttggcattctgtttttgtggctgtctcctttttggtttgttgagggattactttcttgctttttctagggcgtgttttctgtccttgtattgtttttctctgttattatcctttgaagggctggattcgtggaaagataatgtgtgaatttggttttgtcatggaaaactttggtttctccatctatggtaattgggagtttggctgggtatagtagcctgggctggcatttgtgttctcttagggtctgtataacatctgtccaggatcttctggctttcatagtttctggtgaaaagtctggtgtaattctcataggcctgcctttatatgttacttgacctttttcccttactgcttttaatactctatttagtgcatttgttgtcctgattattatgtgttgggaggagtttcttttcttgtccagtctatttggagttctgtaggcttcttgtatgttcatgggcatctctttctttaggtttgggaagttttcttctataattttgttgaagatatttgctggccctttaagtcgaaaattttcattctcatctactcctattatccgtaggtttggtcttctcattgtgtcctggatttcctggatgttttgagttaggatctttttgcgttttgtattttctttgattgttgtgccgatgttctctatggaatcttctgcacctgagattctctcttccatctcttgtgttctgttgctgatgcttgcatctatggttccagttttctttcttaggttttctatctccagcgttgcctcactttggattttctttattgtgcctacttccctttttaggtcttggatggttttattcaattccatcaccttctttgtcgtgttttcttgcaattctttaagggatttttgtgctttctctttaaggtcttctacctgtttagcagtgttctcctgtatttctctaagtgagttattaaagtccttcttgatgtcgtctaccatcatcatgagatatgattttaaatccaggtctagcttttcgggtgtgttggggtgcccaggactgggtggggtgggagtgctgctttctgatgagggtgagtggtcttgatttctgttagtaagattcttacatttgtctttcgccatctggtaatctctggagttagttgttgtagttgtctctggttagatcttgttcctcaggtgtttatgttagcctctatcagcagacctgggagactagctctctccttagtttcagtgttcagagtactctctgcaggtaagctctcctcttgcagggaaggtgcccagatatctggtgtttgaacctgcctcctggcagaagttgtgatccactcacagatgtcttaagatcctgtggagggtcctgtgtataccttgtgggtgtccgcagactccacgcccaaggtaccccggtgctggcgtggaccagaagggattgtgcccctgatcaggctgggttttttgcttcactatttaatgcagtctcaggtctcgcgagattggattggagcagcagctgtgttccactcaccagaggtcttaagatcccatggtgggtcttgtgggtagcttgcgggtgtcagcagactctgcgcccaagctaccctggtactgttgggaccagaagggtgctcatttttatatatggttgttagtaattattttctttcatgtaattgcttatgcccctgcccattttctctgtgctgtgcttatctttttcacataaacttaaagtatatacttagttagtaacaacattagcccttttatgccagatgtggcaaggtgtcagcctattggggatcatggacaaccacagctacagaagttgaatcagttgctattactttacaacactccatttaggaaacattttatgggtgctcacttatctatttctcacaagcagaattagacaagtctgatagttctcttataaatcagagtaaaggttacagtgaacattgcaaggtctagaaaagcttatcagtgtggattctgagagtcactcagcctagagtcccttggaatccaaagtagaacttggctggggggttatttctatggggatctttgttgctggcttctgcacaaaatgaggtaactcacatatgtgctgtaactcaccagaaaaatgcttattttgagtttattaacagtgaatatttgttgcaccagtgggtggtataaaccattcttgtagatgttgaagatttaagttccttcccctagggagtttgtgttcctaatttgcatgcataacctataattaatgtactgttcaccattgtagtaccccatgtttgggacaggatcctcagcattcttatattgaaaatgttgtgcccctgtgcccctgtcaaaaatcatgcttgtgggttttttttttttttttttttttaccgaggagagcagaggtacattctaagggtgccaccaaggtgaatcatcaagtgacaaaacatggttgtaggtaaaagtgaaattgtacctgggaaggacccatagttgtccccagatagttcagttcagataagcgaggccaaagtgtgaaaggaaaagaaagagaagtcagcaagcaggaccatcacaagagataatggaaataaggtcctattttataaagatttatatgctctgaagataagctggaccaattaagtcatgacatcattgagtgcctggtgatgatgaagacaccagcgaaatgtaaaaatgtccccattttgtattggaagattttacacatatggaatttctgatcagctacattcttaagtagctgtgatagtcctagtatccctaggtaatactgtaatttaatagagattcaagactctgataatcttatatgtatgtggatgtacatatatgaatatgtatgtatatacatatatatgcatacatctacacacattcatacattcatgtgttgtctctaatatatattctctagtctttgtccctctgtaaagtattcaaggatctcatgaaatacctatatcattatatcaatttgctttacttggtgactaaatttcaacctatttcaagaatgtttccaccttagaattaattttacttaccttctttttaaatgagggaccaattttttacctgtagagtaatatgaattgaagtaacatgtagagatgcccttgctatgagatgattgtgaatttaatttacccacctaatgcaaagtcccaaagtgtacacctgtacctatcccttagatttctaacttaggatgttccaaattgaattcagtatctcattgttggggaacattgctattaagatggcagtccgccatgacaggatggtttctgagctcagcacaaaatgtggggattctctttctcagtggaactttgcctgtctttgttgaaaagtgcctagacacaggtagctggcctcttcaggccttgactgaaaggtaaccttgtacagagctttctgcaaggctgcaaaactcagcacacacatccaactctggctgaaggcccacaagataattaggtattgcactataaccaatcagcccttcctgctaacttgatgctgtgacctaatagcccctttatacttgtacccataaaaaagcccttatcctatccctgaatcagtcaagttgactcatctggctgcaatggtctctcgaggtctctctgtcattccacctctcctctctttgctcaggttggtagccaaccctcttggtagaaagcgggtggggacacatctcattttcccattctaccattaaacatgcataccaccattcattattctctctctctctctccccgtctccgtctccgtctccgtctccgtctccgtctccgtctccgtctccgtctccgtctccgtctccgtctccgtctnnnnnnnnnnnnnnnnnnnntctccctccttctcccccctctctcccccttccctctctctcccatgctttatcattctttttatccaagatgaaatatcttaactaattttgattctttctcttatttattctctgaacctacttgtttatccagacatgctaatcctactcagaaatgtattgtgaactaaatcttggaccattctggactctgagtattctccctgcttttggccagcctgaaacccaggatgaaaacagttagttgcagttttgtttacctttgttgcttattatggcttcatattgcttaagtaatagaaccatacctgtaccctttatttaattaggtctttaggaaatgggtattgatcatctgtgtgcagtgttctaaatgttgggaacattaaaaaaaagcaaactaaagattcttatcctcatcaagcttgcatttgtatcccaggagagtctaaaaacaatgttataatttagataagtgaaaagacaatacccctccctttttaaagaatactgtaaagcacaagggatacgtttcccttattttagtctttagtgtagcattagagtatgcgatgaagatttttttacttgttgaattatgttgaaatttacttgaaaattatgtaaatatttttggataagacatttcagacaaagaacaatgggaaacagattttttttaaatctatatgtgataaaataagttccaaagtaaaaaggataaaaacagtagtatattctaggcgtaaagggactcaaatacatattatggatttatatatgaatttataatatataaatcatttgaaattggtgaaaatgaatcattcagtgaatggtattgatgactagctaattactttgaaagaaaaaaatggagttggatctccatcttatgacttacaccaaaataaaatggtggtggaggttgtatattcattttaacatttaaattgtaaaatgttattttttaattgtaaaatgtttaaaaattatggagaattaaaggtattttcaagcaggaaaggactttataaacatgacataaaacaaattccataaaggaaaaaatggatatatttggatgtataaaaataaaaacagatgctataattcattagcaggaacaaaagaccaaacttgagtttgttttgaattttatataattagggaagaaagtaacacaaggaaaggtcactgttgagcaggaagactgtaagaagtctctgacttcagagagaggaccatgatccctaatggctaaacagtagaggagaaaatagcctggcagatttaggtggagaataggacatggtttccaactccacgttcaagggaagatcctgtaaacaaggatggcaacctgtgaaaaccttagagggctttgggtccatttcctgagatgaatagtattggcaaaaagagaaatcaatagtctgaaagaaagatgctttcagtctcagacatagagggtttgaggtttaaaaagaacaaaaaaatagatcagccaatatctgtatacttagaacataggaagagaagatgcgacaagttatcagaacacaacagaggaaactgtatcagtgtagacaatgtgatccaaggaaaacattgaagaaagaaaactcagatctagggatggagatgtggagaaactaagtttaaaagtcaggaagtctagactgctcaaagagaatcactaaacctaaagaaagcattgctttgtaggggacaaagatgtgtgggccttcaagagagagtaaggaaaccccaaagggtaaatgactcacagagaaccaaaaagtagctgtcaaagttggcaaatcggatctatctgtctttcttttcctttctacttagagaaaactctaaagtcataagaagatagagaaaaaagttccaaggtagcctttcctttagctccccgacataacatcttacaaggctatagcatgatattcaaaccaggaaatagcattggtataattcattaagctcatggagatgttctcagtttcacatgtcttctttgtatgtatgcttagctctgtattatttctgtcacatgtagatgtgtggaattgtcattataactaagatatgggctgttccgtcaaaagaccccatcttctcttcatagccatcctcacaatcttctactataaccccaacttcttcgtatttttaagatggtttaaggagtataaccctatgaaatgtaagattgaagtctatccccaccgaccctttctacttttgattagtatcctattatatggatgttccacattttgtttaaccatttactccttggaagacatctgggttttgttcatcttggctcatttataagtaatattacgtagctttttttttctgcacaggattttgagtgaatatagatttttctttctctggaataaatgcctaacactacaactgctataccatatggaaagtacctatataagaaacttcctaaacttcctattttccattcagagagaatttaccagtttatatttgcctatactataaggggcttgtgtttttttaccccacacatttcctgatcgtttaaattttcaataataaataatgaatattaataaccatcacaagcatgtggaaggtttaagacagtatcaaaaatgtacaccaatgacttttaagtagcatgtttcttattaaaatagaaaaataacatcacataaaagtattgagtgggtagaaaatatgaatacagagttaacaatgtctaattttggcagttaaacaatcttgaacaaacatcttaatcactctacattacctcaccatcaatcagcctttcagtgaaagagcccaagtcagtgtccctcatcttggataccctccaacctcaattctaagtttcctctaccttatccctgctatccagttgctaggtgtagatttcccagataatcatttctttgcctagaaataaccaagctataataaccatgtctatgttttgccttatctggggacctctgacttattcttcaaggtcaagttcttttcgcactaatagaatttatttaccttattttatcagactttttcccctggaactctgttcctttaacagcattatgaaggcaggcaccatagtgagttctctttccttttccccagcacttagctagcatatttaacaagcacgtgggtaggctctgggaaaatgtcctctggcaaacaaatcagaggtcaacttcctgtttgggacatctgtatctgtcagtaattgtctcaagattttcaggaattattttcaggggctataattccccagaaagcctagttcacgttagctgacatgcgaggcacagggtactgcagtagaaccctcttattctgacagtgtcaagggacacctctgcaaacagtatcatgcatcttccccttcacttggagaaagggacaatgagtataacctcagtgtaattgtgtcttttctgatatagagaccctttaattggcttcctttgttctgttgtaatttatccagtacgctcacttcacagtagctttcaaaccaaaaatcttagctgtttgagaatgactttaaaaacaaaacaaacaaacaaacaaaaaaacctggagcttacatctctttttctggtctatagaacatcttgataattggcttcaccaagaagaaacctgagtgttaaaattcattctgatcatatagtgtatagtcctgcccctgcagttagacatgttttctatgaacttgccagtgccatggctgaagtacaacctcttgctagctctggttgataatcaccgtctttacaacttggcttgtatgcttggtgcttggcatttctagattttaagttcagatgctgagagagctgtagctgaattaagagttctttattttccccctggtgtcaagtgcatcactaaattctcaacacttaattatcattgcgtcccaaaatattcctcatttagcaaaaatattgaaatgactcgttcctgttgaagaagcaagctctgatatgcagaacactgagatgtatgcgccatcgagaacccgagggaatgaatctatttgagagcatctgcagggaatagtagggaccacaaagcccatttaagggccatgtgcctcttacctgtattgggctcaatcgggcaaccaatgtttagtggcaacaacccactgtatgaagttgacagaaacagggaatcatcgcactctcatccgagtttattggagtggcattaaaacgagctgtgatttccttccccgtccccacactcccttctatactccacacaggtgtctcctctatccttttgtctctgggatttcatatcataatctctacttagatcaaggcacccaatagtaaaatattacatagcaggatggtcttattaatagccagaagcatcttattgagcaagaactggaagaagaaggtgcaagctgttggtttttccatagagtgaagtaagaggagaaacatctgtcaaaatgcttgctcagcaaatagacattaaacactcattcatgccagagactctgaacaagatgaggcctctcaccatgagcttcatattctgatagctagaaaacaacacaagcagaggtgttacaaagaaaatagacatacattggataacaacattggttcttaggaagaaaaagtggaagactcaaaagatgactgtcagcatgctatgtgtaggctggcctgacggcccctgtaggttctgggggatagatgccacacccagctcaaatgcccactccctcactgttcccatgagtgtggttttcagtgggcaatgtcagtctgagaatgtgaagacccaaccaactgacctgagcatctaattgtattaactaatctacttggggacagccctgttctttacacgattttaaaaaaaaaagaaaaagaaagaaaatgcctctcagttaccagcttaaagctgtcgtagtggattaaagtaactcagtatacgtttcagagataattatctgacaaccatggatgttccttttattgattttgttatttgacattgtcatatgtgtatatagtgcattctgatttctctctgtccccccaccttcttaatcttccccacttcccatcaaccctgcctcacccttctcaaccctacctcatccctatcagttcctctttcaagttcatgacttttggggtttttgactcatttagtttaaccaggcccatctgtgtgactgttgtgtttaaatgatccactggagcctggcagggtcattactgggtacccaaccgaaggcaaagatttcctgcttctattgctgtcctttctacttcctagacttctgtatatgcctctgtatataccttctgcatacatttgtgaagaggaaaactacattttaagaatcataaggctgaaaagagttggagggtagttcaatgtcaacttatgcatccccagagaggaagattactcatgcagcctggtactcatttccggccctcttatccagtggaattctcagaggctgaagcaaggctgtctgggttgggctgtgaaggtcagttgtagagataagtcaatcacacatacaccttctttctaggaatttcttgtctttctatccttctcaagatttttgtcatggaaaatttgaaaagtagaatttcagtttatattttaggtcatgtagctgttctgccctggcctaacagccccctttcttctcctttcttccctgttgagtggtcaatcatttgataaattgcttagcttagtgttttggactgagttcccttaaaacaaagacaaatagacaaacaaacaaacaaacaaacaaacaagaactactttaaaaaaacagattggctggtttatttgagtctttagctacaaaggagaccaagtggggaatttgaggcacagaaggggaatgaactgagaatgtacgtggagagggtcaggctcattccactggaaactttcttaggagctatgtacagtgtgtgcgggaattgcttcaccaatagacagggaaatagagaaagtgtgtgagtgtgtctgtttgcctgtccctgtgtctctctgtgtgtatatacctgtagttctatttctcccttattaattaccgacctttctcaagttagcacatttggtttgtgctgcttgtgggctgagtgaacgcctaggttttagagaaattccccaagcagagatgtagtaagatgtggacagttaaattaacatagttttacctgtcagtgtgtgcagattctgtcctccacagcttcacactcagaggtagctgtaaggataaggagtgtgtgtgtgtgtgtgtgtgtgtgtgtgtgtgtgtgtgtgtgtgttcacaactcccacttctttggctccattcaaagaatagttccttcattccatatttgttaaacatttgccatactaggaatagcttttctgaggtgattaatgaagtaaaagagcagaattgtgattgggtttagctgagacaatggaagggtggccaatggctccgggtcagccatcacaagcaccttacaaggccaggagataggtgaggtgttatgctctagccatcggggtggtgtggggcagtcatgagctggacactctggccaaaactgcatagaccagcaagagtcctggaaaatgtggttgacattgtaccaccccgttcctgcagcgtaatctcattccccccacccactcatcaatttataccttgacatctgcttggagtccttggtcatttctcttctgccttttcttcttggcataccctactccattttatttcagtctgcttgtgtcctgctcagccatcctgctcctttccaaaaccctcctcactgcagaacagagcgttctcaccatcgctaggtagctccccagttacgcagctagttccctttgggatcattttaaggcattttggtatatagagcttttatgccttctgcacttggagaactctctttgttacagtctttgacaggataagttaaccggagtctcagttgaagtactcactcaggtttaatggcacagagtcaggtcctaagctcggttggaccttacgtttaaaatgtcattggtcctttctacctatgagcttcttatccacaagtaactattgcttgaaaatatttggaaaaaattacactcaggggtaggagatagctcagttaggaaagtgctccacatggaagcaccgggacatgggtctgatcccaaaaacatacattcaaaaaaaaaaaatagagttttgtttgacactgcacgtttgtaacctcagcccagatggatcctgaagggcttgctatttggtgagatacaggctagggactctgtctcaaaagtaggtggtctgtgcttagaggatgacatctgacaccaagaatgtcctctgatttccatactcatgtgcacactgtgtaccactctcttgcccactcatgtgtacacacacacacacacacacacacacacacacacacacacacacacaatgcatacacatacatataaacatgcacacacatgcattcctatagactgaaaattcacttgtactgaaaatgtaaagatgcttgttattgcctttattccctaaataatagattgccaatttgttgagggagcgtgaacagatagcacctgtagatatttgcatgtagggtattgggtatcctacagccaatttctcacgatgatgaggaaaacttacaccagttctcactacccagagggcttgcatctgtcaggttcatgtctattcaactaagaatccctgtgtcgattggcctgttatgctcccttgacctggttggtgggcagtgtaacagagcatgggctgtcaggaggaagagaggcctctgccataggccatcatgtgtatgcttactctcattgtcttcccctgggttaccagaatcccagatagtgttattgcagaggtcctccaggttgtcaagcagctgtgtggaccatacaactgcctcatctcctgggtcctggttataggcggaagcatgcaaccctccttcaggtgattgtgtgaaccaggtgggaagcatacttcttgacttcctcagatggtttgcatcccacgtgaaagttcaggttctttcttccctgttttgattccttttccttctcctacttgcctggttttagatggtaaaggttaaagctatataactagacaatcagtgcctcaaattttcttcatcgaggtatgtctcctccattcattttggtaatggtaggtcctctgatctcaaggggaaaccccctgtaaagcacatctgagggacagccactttctgtctcctagagttatagtcctcttgaatgtttctgagggctagacgtgaaaaacaagacacagcatgtttgcggtttatgtaagcaggaagaaatatatctgttccctgcaggagagagaaacacagctgatggctgcttcccaagccttgctcccaaacaccacagaccactgggagcctaggaatattaacatgagccatgaagatggggtgatttcatgtaaccagtcaggggcatgctgtactgaaatgtagagcatgtgaggaaaaaaataattacctgacagagataatggtcttactgtcttctgcattttgcttctcatgcaaaacacatacgtggtaagaggaggagagggagaggagagttcatgaaagggagaagaggaggagaaataaactttgaaaattccggttgccatggcaacataatgagctccaaaagtggcatctctgaaccagttttgcatgggaagataggggagcccagaagggaaagaattaaaataataaaaacaataaaactgcgatcatgaagtaaaggacacaggcaaagaggccaatagcacttcccagccgagtctggaggcctggcttgtcagctgcttgcccccagctggccatagctgaaaaggtgtaatctatgtcctgcgctggatgatctcaccagtccctgactctggacgatgtgacgctaagggattctgacaaagaagaccctgtgaattatatgtggaatgcactctgctccagaattgtcgagagcagcaggtctcaaccttcctaatgctttgatcttttagtatagtttgttcctcatgttgtgatggcccccagccataggattattttctttgctactccataactataattttgctactcttatgaatcgtaatgtaaatgtctctgttatctgatggtcttaggcaacccctgtgaaagggccattcaacctccaaaagggtgatgacccacacagtgagaaacactgttctagaaacaaggctgtgatcttgttctgttcctccctggctcctcccttccctctgccctttcttataaagagcctaagtgtgttcccttcagtgagcttcactgaagtcctgctaccagtgaggctgccgcatcactcaacccactagctaggacaaaaagtccctatgctggggacttactactccagatggctctcctcttcaacatgccctagaacaatacatgctcatatgaaagaaggcagcactgaatgcttaaaagatacagaccaagaaagatttgtaggctgtttgtttgtatgccatactcaaattgaaaacgaacccaaagcagattagaaatgttacttgtaacataaaaaagatgtgttttaatgaagataccccttgatattctattgttctcactcaatagtgttcatttctttctcattagaatgatgaaggaatttgtaatacataccctctcatcatgtaaccattgtttatctagaaacattttgagccaatctatcaattaacttgttcttagaatggttgcagttggggatcctgctgccaccttgtgcctacttgatattggaaacctaccaatatttgcctgtattctagtacggctcttccaataagcagtgtgtctgacagatgccaattaatatgtttgaagaatgaatgaatgaatgcatgaatgaatgaatgctttatctgaattaaagagtcagatcctcattatacagtgccataacttgaattaaacatgtcaagcttgacagaggatatacagatgaactaacatattacaatgagtacaatgagagtggcaactctctctctttctctctctctctctccctctccctctccctctccctctccctctctctgaaataagcaaatcgtttaattgattatattatatctattaattttatagccccttttgtatattagccaggtaagtagttaatatttatataatgagttctatactttagaacaattaggggatgaggggaacttccttttccttgcttccttcagaaaatgattctggtccccaccctcctcacacataacatgtgaacatagaagactggctactcttggtcctttgtatccatgagctgtaaatctaaagagtcagctaaacttggatgagaaatatttgaatgcagtaatcccacctgtaccaaacatctatagactgcttttcttaatcccataaataacacagaccaacaactaattacacagaattcactttgtgttttgtattgcaagtgaccagagatttagagagtccaggagggtgtgtgtaggttaagtgtcactttatagaaggaattctattattcaagggattgaacatcagtggacattggtatgtgctctaatccacagatattgagggctgtgtgtttctgattctttctcctattaggctggtttgagagttttgaaggttttgaatgggcccttactaaaagaagaagagataccctagtgtgatggttttggattaaaaaactaggaacattaacccatcttttaactgcatacatgactgttagcaatgtttttcattctttgggggcctcagtttgtcagtctgtaaaatgaatattataagacgtcaaaggctatcactgattaaattggagactgaacctagacaatgcctattacagtagagctgtctagtagcatatgactttgatccttaaggacctcttaactcctgaagttggtactaaccctctttactgcgaagttaagggtttgtaagagcctctgaacatctaaaaaatgataaatgctattattacatactttctctcttgtgtttttttcatatccatgtataaatccattagtctaggaatggcagagctgcccaaacagatcacagtcatctgcataactggaaagtggatttatgaaagacaaaggaatatggggggaaattaaaacagagaaaaattaacaaaatgacccaagtaaccacagtagcaggaaaatgttttatattctctatttaactttcacgaaaaaacttggcaagataggtagtgctcccccctccccccaaatcacaagatggacaaaaacaggggctcaggtgcttgtccaaggatatcctgctgggaaaaggaggtctggcattttaacttaggcttttcttaatccaaagcatatgtactttgtttgacaccctgctgccttctcgaaattgcacaaagcaacaccattttttcagggggaggcacactcatggggcttactgatctggacagttgaggggggactaagaacataattctggaaggtcactctgatcacagaaaaaggaaatctgttaagcagagaaacagggggaagggtatcctctaccaggagattgcttctgtgttcttagggatgacttgatctaggtggggccaagaagctgagttcacattcacaatgctttttcaggacagtacttgagggtcaagggtcctggaaaagtctgttcacatcctgacctgtcaatggccgagcaaagaacatgcttgactgagaagctcaaagggcgtggggttgacaagacaaacccatgatcaggaggggcccaaatgtatgaagccaacattctgaagttgactctctggtttcaggaggccatttagagactagaaagcaagaggtaggcaagggaaatcagaatttataagggaggaagacaggatattcagaatgggcccttgtgaggtggcctgggcaggtttttcttaggcagcgaatatcttgaaatatttgcaaggactgaggttgatgtgctatggtgaagaattctccagacagcatggggtagatagaatttgagttggagcgaggctacaagccacaaatgtggcaaccacatgggcccgagtgagtgaaagctaccacactggggaaacatgtgggctgcaaagcaacagagccaagagaggcaagagctaagtgttccctagctcatgttctctgttctgcatgcacactagcctaggtgaccctgccttccattctcctgcttcctgacgggaaaccaagaatgacttttgcctattacctaccagtcatagggccattcaacagcaaaccttaccacaccctgtccatggtcttcatccttctcagggaacacatgttgcccaattaagagtctcttctagtcatgatgtgttagaacattttatgaggtctttttcttcccttaggtttctccttttccagttcctacatttctgaccacagcctctcagcattcctcagagtagatagagccatatttatgtcttagtgcctgtgggtactgtaacacaataccacagacttggtgccttataaactaaggaaatatggctttcatatcctggaggctgtaagcacaagatcgaagcagtggtagactcagtggatgccgacccttttgcggtctacataagacaaagcagacaaatgagctctctgggtgtgttacaaaaagtaattcacccacaaggatccatcttcacaacctagtcaaggtgcaaagactggcctccagcaccatcattattggagttatgatttcaacactgacatttaagaaggacacagacaaccatagcagggtctagagctaatgggtcaaaggacctcaccacagatgccacttagacgctcaggctgaccttcattgctgaattcagcgagtcacattggaggagagctggaagggagcataggtaggtgatgactcagagcagatgtgccacatggcaattctgcccacgtttcatgagtcggagctagtcacctggctgtctaacagcaaggggaaaagaacagcttggaagaactggatgatcttctcttggtctgggagaaatgccgggtcccccagagggagtgttagctgcctgtgccttgtataaggtctcatttgccacctcagctaccagctagccctgtctttagggtcctcggatcatatcctaacacttggcctttcctgtgccaaacagccctccatgtaacccaattttcaactttgagatccatctgaggtgcttttattccagtacccccacctcctctttctaatgaccccccaaccccatttagttatcttggggagacagttctttggaattcctggttcttcctttcatggtctgcagaagccttttcattctctgagaaatctattgacctttccatcctcctgtctgtttttcagtctctttaattgtgttgcatccgtgtaccaaatgacatcatctccccatctatagttcttggcacaaacataactaatttcctaaaaaatagatctaatcacgcttctcccctatgtgaaaccactatggttttcctgtaactcacagaataaagcgagtcacatggagtcaccagagagataaaactgttgacaggaactagatagacatagatttgaatcctaagttgctacccactagcttgagttatgtaatatcactttccagtccatgagacaaagataatttcttctccacaggattgtatcatatgtctttcattacacatgtctgccacctgattagtgagggactctggaaaagtcatctaaaacacccaattaaaaacctaggctattgggcttgccattctctggtccgatctgtctcagccacatatctcctgattgtcatgggggaaagaaaactcaggagaattttgctctggcaatgaattatcttaaacatacctgacataactagtcatgtgattccattcaatagcatggcctagaagacaaagccaaaaatatttttatgagcaacattgataactgaccctttgggctacctctagctggatcaagctctgatatttgggttccatgactgtagctcaggtaatattaacacattttccttagtctacttctgaagaggatggcacatacatctttaagacaagagctgactttccaagatgctctagctagaaagaaagtgggtgatgttttagtgacttctgtcagttataggtaagaacactgaaggaccgagaggaataagatgtccaccctgctatccagccgactctgagcttcagcctagctatcctgggctatcatttttcccttccagctattccctatatctggctttatttttttcaggggctagtttttccactcatttcctgtatagccttcaagatacaatgtcttggacaccttccccagctcatcccacagaactgaatgttctctacctccatttcatcaagcccatttataacgtttaataagttttattggcttatgtgtctgtctccttggaagattaaatttacttgcataccacgatggcatcttcagtatcttgtattacccaatctagcaagtgattcttttaacttgtgactctggacaagattctgtacccgagtgacagggaacagacaaataacaaacaaaccccaacaatttctgcaaccacacaaacatgcaagacagggttcataccaaatcctctggcttctggctttttaaaaactgagtcagtttgtcattcagcagtgcggtctggccatgaaatcctgccttggcttctgagtagccaggactggatatgcagatcgagatgtgcagcaaagatttatgacttcttccctagtcattttccactgcttgtaattctccagtgtcttataggtatgtattcaatacctcagtatggggcttaagagaccgtttctgatcagattgccctctttggtcttcattagcttggctgacttgctttgtatctgcttgatgctaaaaccacatttccattcaagatggattcttcccctaaagaaaaggctttttacaaaatctaattattttaacctttttagtgtcatgctacagaaaacaaatcggctaattctaggttgcagtttgacagcttttgaattaaaggagtctaaatggctttgggggacttaacgtattgcaaagactgagttactcctgagatcgtttgtatgaaaatggtttgtaaattgtgaagtggcctataagtatgatttggaacatcagtactcatgtatagtatgtgctgaatgagaatttagtgagtgaatgaggcttcttttttccctcaggcatacgcttttgaagagaatgcctttgctttgctgggccgctcagtcttctttacatatgtcatgggagttttccccctccattcttttctgtttccccgagactgtgtcctctgtttgaccccatttattgaatatgaagtttcaattatatccaggttgtagctcagtttgatggacaaaacataaataaaattacttttaagggactctccaagctttgcttaaaagaaagtttctcacaggttacctctgcctcatagtgcttttgatagggaaccaaggatggcaagtatctgatcaagactggagtctaggctctctggcttctttgtctacctatcctagtctactgaattttctgataatcattgttcatcatttatctttttgtcttcacttggtgataagactatggtctctatcccttattagttctctactcctctaagtctgcaaggctatagaggccacgggaacctaggctctagtatttagttcacagcttcatgtctctaagtgctgacccttctggctgatatactctggttcataggaagatgaggatacctctgatatccaggcagttcatcttgggttgctgacggtagtaattatgaggcctccccaacccagtgagggcagtagaatcatgggggaattacccactgtctgaaggtatttaagaaggagggttattgatagcaaaatgggagtactcagagaattctgtatcagagttttagaattctatcttaccttaaagatggatgaagatgttggatgatttatgatgattttcttttgtcattgactactggaattatcttcatagcccttgttgattggcaagattggaaatatgcaatagagggaaaaattaattaatttcccccttcattcatagattttgagaggtggtggtggtgggtacataaagcttctgttgaaaagaagggtacaaccatctaacctttaggtgctgggtagggactgaaactacgaattaattgggcagtaggggcctggataagaactagaacaaatgtcatattcatcctagttatctttgtcctctaatggactgttccaattccccatccttccctttaatactccctcagtgaatgaagatatctgtacttttatgctcttatggctcactcagatttagggccaactccccactggaaacatggtttgtattcattgatttagtgggtggaggttgtcaagaccacctctccggtgactagagcattgtcttcgaagaagcaatgtgcccatagtcaggagaaaagcagcttaagtcctactcaggtaagtacaaggcagctgagctccagagactatggctacagttatggatgtagctggcatatataatttcttggggtggaatatgtttataagagttttgtaatcatctgtgatagtatatggtatattgcagtttccagagtgccttgattatatttattcttttatctctctcataacgtcaagagaaatcattgcacccattttgtaaagagaggctttattgatgacttgtgtggaatcacataactcaaaaatgcccaagtagggacttgaagcaatcccttcttgtttgttgctttttctcttactgttcaactctttcccaaccatgaaaaactattttttcatgaccatggttcactgattaaaaacaaactcaatccaatcaacatatccatcacttcacatcttctcatttattggtggtcacagaacattcaatatcttgtcttactatgctgtataatagacattcagaatacatttatgttatttaaagaaactttgtttcatttggccaacatctcgtttgccttcccacactaacttatggtaactaatattctttctgtttctaaaaggtcaaaattttagatgtaattgggatcatatagtatttatttttctgaatgtaggatatatattcttcagatttacatccctctaatctaaatgcctggcagacactcttaaggaaagataccttttggctctgtttcagagggttgggtctatgatctgcttgctttgtggctggggacctgtggtaagagtgtggtagatgaaagtcacacaggggaaagatgattacttcattcagccagggaaggagagagaggggtggctagaatcctgtccaagagatactcttcaaagaagatttatagtaattcacttccttcaaagaaccattcagtatgaactcattaatggatgaactcattaaagtgtttaatctcctcataagtcttagtgtttgaatccaccaaccagggactcagtatttaacacacaagctccagagagaatactttgtatacaaaatctgcctgcctcagttatatataaaacacaacataatggcctttaaatttacctacgatttcacatatgacagaatctcttttcagatgcaaaagagtattttgttgcatgtgcatgtgcgtgtgtgtgtgtgtgtgtgtgtgtgtgtttgtgtgtatctcattttccttatctactgttttgatagacacttagattgatcgcatatcttggctattgtaaataatgctttaataagcatgtgagtactgatgtccctctgatgtactaatttcatttccttggatatataccatgtagtaggattgctggcgaatctggtagttctctctttaattttctgagcacagtatttctttaatggctatactgcttatagcctcaccaacaatgcacaaaagaacctttcttcacattctcaacaaccttagcttttgtcattttgaaaacaggcattcaaacatgtgtagtgtaatagctctttgggattttactttgcatttccatagcaactaatgatgttgaactggttttcaaatacctgttcctcacctatatttctgcttttgagcagtatctgctcaggtcctctgtctaatactttgtcagatgtgttttctttccccgctgtggctgtcttttaaattgttgtacattttagatattgatccctcctcacatatatcattggctgatactttctcctattctgtacgttgcttctccatcctcctgcaatgttcatttcttttggtactcagaaggttttttaatttgatggagtgctgcgtgtatgtggttttgcttttgttactggtagtttggggtcagagtctagaacttagatgcctagaccaatgtgaggaggttttctcttgtgcctttctagtaggttttagtctctcatcgacatctctatcccattttgagttgatttttgtgtggtgtgggaactcattttcctgcattatcacactcaggctctctagcactgttccaagaagatcatctctttcctctgttgcatatttttgctacctttgttgaagattaatgatcacacagatttatttctgggctctgtattgccttggtttggtctgtatgtctatttgcatgccatggccatgctggagtcttgttttgttttctatacttgcttgagaaacgatcttcttatgttgcacaggctagtttcacagttacaggctgcaatgatccctctgcctttgcatcccaaggagctggtattgcaggcacatgccacttatccaaatactatgtggtttttgaataccataactgtgtaatttttagattgggcaacgtggcagtttgttctggactatgcagtactttatggctgggattgcttctttatatttccaaaagaaatgctattagaacttcaagagattatatcaaatctctagattgctttgggaagaagagacacattaagagtgccagcttttgtaacccaggaatacaggatacctttctagtccctgtctctccttttgattttttcctcggtatgttatagcagtaggcatgctataagagatcatttacttccttgagtaaatttgttcctccttttcatactattgtctgtgggaatattttcttgctttgtgctttttagaaaatgtattgttactgtatatggtttctatatgttgattttgtattttgcaacttggctgaattttattataacacttttgttgtagcaatttggcattttctgtatataagattgtgtaatctgcagatgcgaatgattgtattccagatgtctttctttgttgttctcatctaattgctctggctaggacttcctccagtaatatgttgattggaagaagcaacagtggatatgtttgtcttttcctggtcttcaaggaaaagcttttagcctttggccatagagtaaaatgtaagcgttgagattatatgcgaccttactagtggttctcaacttcctaatgctgcgaccctttaatacagttcttcatgttgtggtcatcctcccccatccataaaattattttttgttgcacttaataactataattttgctactattattaatcataacataagtaactgtgttttcctttggccttaggtgacccctttgaaaaggttgacccaaggggtcctgacccacaagttgagaactgctgttctgtgcctaatctattgagagctcttatcttaaaggaattttcaacaaaaaagctgatataatttccttcattctttgatgtactatatcaaatttattattttgtgtatgtgtatcatagtgaagaatctttttagtatcctgttgaaatcagtatgttaatatcatacagggtatttttaccaccccaaaaatctctctgtgtccttcatattcattcctttccccccaaactgtaggaaaccaatatttttattgtctatggttttgcctttgtcaatatttcatacagttgaaacagtccaatgagtagcttggttaatttgctatagctataacataatacagtgggctgtattatttataaaaggaagaggtctatttgccccaaagtcctagaaattataagtcctaaagtcggtgtccatattgttataggcctcatactataccatatcatagcagaaagcacactggcaaggaaagacatgcagactgaacttgatattaacatttagttgtaactgtgaactcagtcttaagagagaactcatcaccagaataattaactcagtcccacaagaaagacaccccttttgaatatttattcatccatccctgaaaggcccctcccaccactataatcatagtcaggtttcaacatgagtttataggggacacatcctaatctaacagcctttttcagattgaatttttgcacttagtaataagcatacatttatgtttggccatttcatggtgtaacagatcatttatttttagcgcaaagtaatacctcatttctttttagtactgaggtctggaagtaccaatttttctaaaactatttacctactaaagggcatcttagtgactccctacttgtagcaattatgtataaagctgctataagcatccatctaaaggttctgatgtagacagaagttttcaattccattgggtaaataccaaagagtataatcgctagatcatatggcaagaatgtttaattcccaagaaagtgccaaattgccttccaaagaggtggtgtgtgccattttacattcctactgtctatgaatgatagttcctgctacttcatagcctcaccagcagctgatgttgtcagcattacacattctgaccactcttgtcagtatgtaatgatgttactgttgttttaatatgtacccctcataacatatggtgtagaacagtttttcatgtgcatgcctaccatctgtttatcctctgtagtgaggcgcctaattaagattactcttaatcttgtttcttttcttgttgttgggtttaagagttattggtatattttagatagcattttttgttttttgagaaagggtttctctgtgtagccctagctgtcctggaactcactctgtagaccaggctggcctcgaactcagaaatctgcctgcctctgcctcccaagtgctaggattaaaggcatgtgccaccactgcctggctagatagcatttttttttagaatattttctcagtttatggcttctctcctcatcttcctgatgtctttcttagagagaagtctatagttttaatgacgtatgcttagctcccccctccctgggtgctttttttttcttcttaaataatatttttggtggcttttctaaaaactcattcttacaaccaaatccatctgagtatattcttagattgtcttctagaagttttatgatgcttttcattttaggctgaagttcatttgcttattccaattgcattactccatcaaaataccacagatcaggtaaatttgcaaatagtaattgataaaaactataaattgtttagttctaaagtatggacatctaagatcaagaaacaaatggatttggttgtagggtaaaggatctcttctctcaagatgatgccttcaggctgtatcctcaggggggcagaaggagaagggccatctggaggggcagaggttctatgcttcatgacacagaagacagagtgacagacagaagatgtgaagctgtttccctgcagccttttataagactccggtcttctttatgaaggcaaagtcctaatggctatttacttcctggtggcctgtgttctcaataaagttgcaacatttaagctactgcatctaggttgtttttcaacaaaaccttactgtgtagccctggcttacttggaagttactatataaaataggctggctttggacttacagagatcttcctgccttggcctcctgagtgctgggataatggtatatggcacatgccttactttgttgttgttgtttgaaatgttcattgatttatacaatatattttgatcacatctggcaaaaaacaataacccattgagcctattagtgatgcacatggatgtggtgttatctcttggtaagtaaaatcatgccataggccatgcttgatataaataaattgtccaccttctgtagcatccttcttaagcatccctcacttagggatggggccttagaatcacctactctgctagaatttttaacattctcaatctcatacaaggagccacagttcctgtgagttcatggatgtaacagccatgttgtgtccagaggcagcatttcatagctctcctctccattctctagagctttccttctttctccaaattcttttctgctattccctgtgacttggcaggggtatggagtggggacaatagcaatgtcccatttatagccgatcactcactgtcatgtaattcatagcatattgagcacttaggaatctcttcattagctagtatccatggcaacaagaagcctgaggttgagagatactcaaatctggatctcctgggctatgtggggcagcacttgagttaaacttctatggaaacttaaaactctataactatttttaagtttgtggaagtccattctgacactgttgaaaataccatccttgttccattgtgttgccttgggccctttggaataggtattcttgtttgtgtctattactggaccccaaagtctggctcacaaattcatctgcctattctttaacaatactacattgattcgattactgtagatatatactaagtcctgaaaatagccattaactctgctctttctttaacagggtattacatgctcttttgctttggcatataattgctagataatttggtgttccaataaccacagaactactttctgggagttttgtggtgattacagtgaatatgtgcattgggttggaaagaactggcctcttgacagtattgacccagcctatacctcccaacaattttcttatttgaatttattcacagggttttttggttttattcgtgagagttttgtaagttttatatatatgttatagttttttaaaatcacatttcatttttgagatgctaatgtgaatgacacattttaacttcacatttaatatgttcatttatgatatatagacaaccaattgttaactttgtgcttataatctccctaattggttattaattctaggagtgttgacatttaaatctttttatatacaagtgagatatatatagtctcttggaacttctttaaagacattgtatttggcatgaaataattttattttaattatagatttactttttttaatcttgattttgtattgaattgttcttaatgaagctgcatgtctgaatagttcaccagatctaaaaaaatcttacattgcaatattttctcaatatttattgcttttttggagttatgagttgattttttcaggatcttcattgtctctaatttccactgtacaaaataaaggtatctatctatctatctatctatctatctatctatctatctatctatctataactctatttatacagatacacacacgtgtgtgtgtgtgatatatgtgtacatattcacacttatctgccctattcactgacatttccttggaaatgtcttctgctatgtaacttacctgtgaaatataaatattaacaaaattataaaaatcagagatgataaataaaaagaaaaaaatcactgcagatccaggagactaattattcactatatactttaaggatatataatgaataattttcttcacccaatgtaatggcttagatgacatttcaatctctttgaaaatataaattactaaaagtgatataacagaataaaaatctaaaaaatgtatctattaacctacatttctaatctaaaactttctatttcaatttactttgttttacctagcagttctaccaagctctgagaaagaagtaatgatgttctttcacaggctcctttctttttttttttttaaattggatattttctttattttcatttcaaatattatcccctttcccagttccaaccccctcccagaaacaccctatcacatcctccctcccctgcttatatgagggtgttgtaccagcttgttccagaggggttgtaccagcttgcattcctaccagcaacacagtatcccttcaaatgcagagaataaatgacttcccaattcactcagtagctaccaccacctcaacacttagcctctcaactatgtcataagaaataaaacctaaattgtatccattatgaactggggtacaaatacaaacaacaaaatgttacccatcaaatctggcagaatataaggacatattattactaaacaatttttgattgcaagcttcatttatcatttgcaaaccaatcatcatgtataaagaaaagggcttagaacatctcaacacaggcaccaaaaggacttagcaaaatttaatcttcctgtttaataaaagttcatagtgaattaataatagaagataacattcttggtctgacaaaaggacatctataaaaaacctactgttggcctcagacttgatgctgaaatattatgaaatattgatcctcttctctgtaatctagaaatgtacaaagttgcttttgccacttcttttcaactcattgttaagtaaatttgagccattttaataaggcaaggaaggaaaaataaagggtatgtaaaattaaaagtgaagaggtaacactgcaagcttttcacagcagacatgatttatactgtaaaactctaaccatggtctctccataaaccactggagctggtaagtgagtttagcaagatcacaggatgctgatatcccgtgtaatatatacaaaaatacaaacatcctttgtaaatatacaaaaatagttggactatatatacttatgcactcataattatcaacttcattttcaatatgtgaattttaataattttaaaagtaatagtcaaatattcaagaataaataaaacatctatccatgcctcttcaaccaatataccgagcatactacagtaaatgaaagaaatcctaaagatgagcagaacacacttatggattgaaaatcataccagtgttaagcaatctgttatccctggactgatgtgtagtttccacatagtaatagtaaatgatatattagatctagtagtaccaaaaaacaagctaatgtaaagaaacagacaagatgattcaaaaatagatatgaaatacatgagctttagcatagccagaattattttgaaaaaagaacagtgttgcaggacttccatcatttggttttaagagttaccaaaatggtaatataaccgagacaaaagtccctcttttgtacagttggtgggttaatccatgagaacagaatggggcgcctcctctgttgtgtgggtggccagtttttaaatgaggtacaaatattttaattaaatctgcttcgtataactgatgctcccatggaaaaaaagaaaatctaaagccttgtcttttccagatcaaaattaatttgaggaaaatctttgaaaagttggagaaggaaaatttacttgaagagaatgtaaaaaaatcccaggtaatgcagtgagcagtgggagtccactctaatagcttccattgggtagcctttgttaaagtttgaaaacaaaagtttggctcatcaagatggacccttgagagataaacacaatggactaagggaaacagccccatcagatacatctaattttcagttttgactttggacattgtgctactttattatgagcttaggaatacattaattaaaatgctcattgcctgagtattttgtgtgaaaagattcctctccctccccccagaacatgtatgaatcattctgtcagaagaaattggttctttgatctttcatgttccttgcaaaatgtacccattttctaagtagcagtaggtaaaaatacagtcagagtgctaaagaactaccttacttcacaactaaacaaggttctatagctaaatctgatccctttctttggaaagcagagcctgtactttctaggggcatggctaggaggcattactacagagcaacagacaaacctactgtaaagaagtaagctaactctgaaatgaaggaataggcaaggatctgggaaagaatgctgacatgacatttacctctgagtgtcagtttttataaaagacaggttctggctatacatgtacccatatgtgcacatgcacttctttccctaaattcaggggtaagcacatttatgcagaaataatgtgttttctgctaagaactatgtaatacttaaactttgaatgcatcgtgacatttgtatgaggtccgtctaagagatcagtgtttattagcagaacatgtttacttgcaaaataatacagctgtttatgttggttaaaaatcagtgttgttcatagaaactcattctagtaacatctatttatgatataagggcaatgaaagttcccatctccctgtgcaagacaagaatgtgagttaaatgcctcttcactgatccacccttcaacatctctgagcaggatgagcgtaatagatcctatttgcagtccaggggccatggtgacttcatagtctagcctgttagctgagcatatcttggaggacaagagacagaagtgaggacaaaaaaagaaaaagaatggaggagaataaatgataccagaggaggagaagacatagaaagaagagaaaaagaaaagggcattgaaaatgctactcatacaccctagggtgctgagtcctgcaggtctccttgtcctccttgtcctttcaacctactggggtcagaggatatgattttgccactgcacgtgtatatgacctttgaaaagctttcaaacctctcttggccttgttatgtgtggtggagggtactgagtgtggacttcaggcctcatatatgcttgggaattgctctctgactgagctataaccctggtcctttttaccaatgaaagaatatcatgtattttgtgaaagttaaatgaggcagtccttacaaagcatttattggcatttctggagcatcaaacccaaactgaagggaactcatatgatgacctcagtgccacactttcttgccacaaagaaatggatttgctccagggagtctgtcaaactatctgtggtgaagaattactttttgaaatctccagtcaagtgtatgtgatatttttataaaacacttttattccaaaatggattaccagaaaaaaatgaaagtacaaagagatataaaacaaaacccctaatttttattctttttttttaattggatatttctttatttacatttcaaatgttatcctatttcctggtttgccctctgaaaaacagtctccccctatttcctcctccctccccctgttcaccaacccacccactcctgattcctgaccctggcattccctcacactggggcatagagccttcataggacaaagtgcctctcttcccattgatgattgactaggccatcctctgctgcatatgcagctggagtcatgagtcccaccttgtgtgctctttggttggtggtttagtacctgggagctggggggggggagtactagctagtttatattgttgttcctcctatagggctacaaatcccttcaggtctttgggtcctttttctagttccttcattggggattctatgcttaatccaatggatggctgtgagcatccacttctgtatttatcaggcactggcagagcctctcaggagacagctatatcaggagtcagcaagcacttgttggcatccacaacagtgtctgggtttggtgattgtaaatgggatggaatcccaggtgagtcagtctctagatcatttcttcagtctctacttcacactttgtctctgtaacttcttctatgggtgttttgttccatcattctaagatggatagaagtatccatactatggtcttcctgcttgagtttcatgtggtttgtgaattgtatcttgggtattctgagcttctgggcttctgagctaatatccacttttcagtgagtgcatatcgtgtgtgttcttttgtgattgggttacctcactcaggatgatatactccagatccatccatttgcctaagaatttcataagttcattgtttttaataggtgagtagtactccattgtgtaaatgtaccacattttctgtattcattcctctgttgaaggacatctggtttctttccagcttgtggttattatacataaggctgctatgaacatagtggaacatgtgttcttattacaagttggaacatcttctgggtatatgccagtggtatagaagggtcctcaggtggtactatgtccaattttctgaggaaccaccaaactgatttccagagtggttgtacatcttacaatcccaccagcagtgttcctctttctccacatccttgccagcatctcctgtcacctgagttttttattttagccattctgactgatgtgaggtggaatctcagggttgttttgatttgcatttccctgatgactaaggatgttgaacatttttttttatgtgcttctcagccattctgtattcttcagttgagaattctttgtttagctttgtaccccatttttaaataggataacttgtttctctggggtctaatttttaatcttacatttaatagacataatatttttgtcaaattgctctgattctgagagctttccatttctgagtgtatctcatcatggataggcaatgaagaaggaatatggcaacatttttgtttcatagaatctgaacacactgtgaggagcctatctatcctgggcaggaatatatgagtagacttagttaacttgaaaagttttaaaaagtctcttcttgggtggagggtatagtctaagatggcagctccctcatacttccaaaccagaaagaatgctgtacattagatccatgtcagggattctctagagtcgcagaacttatgggtagtctctatatagtaagggaatttattgatgacttacagtctgtagttcaactctccaacaatgatcagcagaagcagctgtgaatggaagtccaaggatctagcagttgctcagtcccgtaaggcatgaaggcaaagaagagagaatattccttcttccagtgtccttatgtaggtctctaggagaaggtgtggcccagattaaaggtatgtaccaccatgcctggatctgggacttgttttgtcccagatgaccttgaactcagagatctccttaccttagtctcctgggattcatagccacgatgcctcaagatccaggtcagaaacttgtatctcccagcctcaagatcaggatcacagatgagccttcaaatcttggattgtagtccattccagatacagccaagttgacaaccaggaatagccactacaatctacttcccaaagtcccatgtgaaaagtttcttctgaagatggtgaatagttagaatggagaaaaatcactaagggttcagaaacaaagactttcccaaaagatactgtcctccctcctccctgaagctcattagtatcctcttatgatggtaacttgttaccttgagtccaaatgtctggtttaatatatcaaaatgatgggtaattcagaattatccattcatagtactttgtacttctaaaagaacatttggagcctcagattcaacccatatctattgacagtctatcatgatggaggctatgtttggtgctttggctatgtgcctgttgacatagcagcttggtaagattggcagcattatcaatgccatttgttcagaaattgaatttcagagagttatataatttgtgtattcaaagacagatgtgctaactataaacacttactttctgctgtgctgtgggtttaattatcactcataatattttgtcacttctgtttattatggccttcactttccagggaggacagcaatcaataaacatacaactagatatttcctaaatgtctatctcaagtcatctatctgttcagaacgagaatttgctcacctgcttttgcacctcttacctctaataaacaatgatatttcagtgaggtggtaattagttagcttcatctcaatgaagaatttagcctatctgtaaggccacctaatgaagttggtgatttactaaaaatcctcaattttagaaagcctttgaaataaaggttgatgatcatcaactttaggtgaaactacagaggaacaaaatcccaactgtagcagaaaatacttaggcatagcaaacagtgtctggctacaatgataccttatagctttaaaatggttttaaagctcatataaaatatcaaaaggaagataaaactgctggttctaagattggcttggttgagaatgatttattaaaggtagtggtagtgttattgattgcatcaccagtagagatgatctataagactatgttacctgtgttttttcattcagtaaatattagttgagttccttctaagcatcacatatactattctagacactgaggaaatgataagaacaaggcagaagatacccttttctcatggaatttgcatcatatagaaggatagaaagtcaagtaattaaagaaagagcctttaagtgatgtgtgtccttagcaaaatgaaacattggaaaactagagttttacaggtagtgggatagtttttgtttttgtttttatttttgttttagtgaaccagtgactttttattggtgttattcagaggagtatgggtaaggggttacttacatgagcaggcataactaaaataaaaagcagctgtaatatggaaaaacccagtctaacatagaattggtactcatgaaagctctctgagaatctgttctcacagctcagctagtcttgagcctacctagcattgttccctatccccgctcctcccccctctgtctgtaacaccaaggaaagcccttggagaatttttcaagtttaagctttcccagatatgtgatgttttattgacatcctaagtattatgagccaatacctccctccaaaagaaaattttgattttgtatttatgaaagaacccctaaagtcaaggtgggagaaagataaagacatgatccatcaaatgttttataaactgtagtaagaactttggattttaacagtgggaagctggtctgtgccagtgtatcttgggtgcaaattctgaaaccagccccacagcccccagaggaggccctactctcaggccctctagcatacccaggattacaggattcaaagatcccagaaacttggtcacaccaggatctcagggtctcagaggcagcttgaataccaggaactctcacacacctagaatcttaggatttcggaatcactggatcacagagacagctggactctgaggaattctgactcaaccaggattataggaaggacaggctaggattataggaaggacaggctccagtcagatatatagagagtagggagcactagagataatcagatggcaggaagcaagcataagaacataagcaatagaaaccaaggttgcctggcatcatcagactcccaccacagcaagtcctggatacaccatcacaccagaaaagcaaagcttgcatctaaagtcacttttcatgatgatgatgatgataatagaggactttaagaaggacataaataactcccttaaagaaatacaggagaatacaggtaaacgggtagaaacccttaaaaaggaaacacaaaaatcacttaaagaattacaggaaaacacaatcaaacaggcaaaggaaatgaataaaaccatccaagatctaaaaatggaaatagaaaaaaataaagaaatcacaaagggagtcaaccctggagtttgaaaacctaggaaagagatcaggggtcatagatcaggggtcatcaccaacagaatacaatagatcaggggtcatcaccaacagaatacaatagatagaagagagaatctcaggggcagaagataccttagaaaacattgacacaacagtcaaagaaactgtaaaatgcaaaaagcgcctaacccaaaatgtccaggaaatccaagacacaatgagaaaaccaaacctaaggataataggtagagaagagagtgaagattcccaacttaaagggccagtcaatatcttcaacaaaattataaattaaaacttccctaaccaaaagaaagagttgaccatgaacatacaagaagccttcagaactctaaataaactggaccagaaaagaaatccctcctattacataataatcaaaacaccaaatgcattaaataaagaaatagaagatctcagaagatggaaagatctattctcatgaattggcaggattaatatagtaaaaatggccatcttgccgaaagcaatctacagattcaatgcaatccccatcaaaattccaaattaattcttcatagagttagaaagagcaacttgcaaatttatttggaataacaaatacccaggatagtgaaaactattctcgacaataaaataacttctgtgggaatcaccatccctgacctcaagctgtattacagagcaatagtgatagaaactgatattggtacagagacaggcatgaagatcaatggaatagaattgaagacccagcaatgaacccacacacacatggtcacttgatctttgacaaaggagccaaaaccatccagtggaaaaaagacagcattgtttttattagatattttcttcatttatatctcaaatgctatcccctttcctagtttcttctctgaaagttccctataccctcccccccccgccccccagctctgcacccactccagcttcctgaccctggcattcccctgtactagggaatataatcttcatatgaccaagggcctctcctcccattgatggccaactaggccattctctgctacatatgcaactagagacacaagctctggaggatacaagttagttcatattgttgttcctcctatagggttgcagacccctttagttccttgggtactttcaatagctccttcattggaggccctgtgttccatccaatagatgactgtgagcatccacttctgtatttgccaggctctggcatagcctcaaaagagatagctatatcagggtcctgtcagcaaaatctttttggcagatgcaatagtgtctgggtttggtggttgtttatgggatggatccctgggtggggcagtccctggatggtcctttcttctctctcagctctgaactttgtctctttaactccttccataggtattttgctctctattctaagaaggaacgaagtatccacactttgatcttccttcttgagtttcatgtgttttgcaaattatatcttgggtattctaagtttctctaatatccacttatcagtgaatacatatcatgtgtgttcttttgtgattaggttacctcactcaggatgatatactccagatccatccatttgcctaagaatttcataagttcattgtttttaatagctgagtagtactccactgtgtaaatgtaccacattttctgtatccattcctctgttgaaggacatctaggttctttccagcctctggatattataaataaggctgctatgaacatagtggagcatgtgtccttcttacaaattggaacatcttctgggtatatgcccaggagtggtatagctgggtccttaggtggtactaatgtccatttttctgaggaaccactaaactgattttcagagtggttgtaccagcttacaatcccaccagcaatggaggagtgttcctctttctccacatcctcaccagtatctgctgtcacctgagtttttgattttagccattctgactggtgtgaggtggaatctcagggttggtttgatttgcatttctctgatgactaagaatgtggagcatttctgtaagtgattctgggccattcgatgttacacagttgaaaattctttgtttagctttgtaccccattttttgatagggtaatttgtttctctggagtctaacttcttgagttctttgtatatattgtatactagccctctattggatgtaggattgataatgatcatttcccaatctgttggttgcctttttgtcgtattgacaatgtcttttaccttacagaagctttgcaattttatgaggtcccatttgtctattgttgatcttagagtataagccattgttgttctgttcaggaatttttctcctgtgcccatgtgttcgaggctcttccccactttctcctctataagtttcagcatatctggttttatgtggaggtccttgatccacttggatttgagctttgtacaaaaactccaaaaaaccaagatacaattcacagaccacatgaagctcaataagaagaaagaccaaagtttaggggcttcagtccttcttagcaggagaagaaaatactcacaggagcaaatatggagataaaatgttgagcagagactgaaggaaaggccattcagagactgtcccacctggggattcatcccacatagagttaccaaacccaggcactattgtggatgccaagaaatgcatgctgaaaggagcctgatatggctgtctcctgagaggccctgccagagccttacaaatacagaagcgtatgttcacaaccaaccagtggactgagcacaggttctccaatagaggagttagagaaaggactgaaggagttgaaggggtttgtaaccccataggaagaacaacaatatcaaccaaccagaccccccagaactcccagggactaagccatcaacaaaggagtacacgtggctccagctgcatatgtagcagaggacgacggccttgttgggcatcaatgggaggtgaggtcctcctcggtcctatgaaggctcgatagatgccccagtgtaggtgaatcaaggacagggaggtgggagtgggtgggtggatggaggaacaccctcatagaagcaggagggagtatgtgatagggtatttctggtagggagggaaaccaggaaaagggataacatttgaaatgtaaataaagaaaatatccaattaaaaaaaaagatgggaagctaagggaagaaccttaaattatagtgttttatatttgttttgtattaaaagttacctcttctctttcttctgtgatggtaataggagattgttattggagtataaacaggaagtcagttagggagcttattggatggacactactgtaggtgggaagcatccaggcaagaataacaagtagggttaggctggtagcagtgttgttgaagagaatttgcaagaactacaaatcagtaatggattggattgggatagacataagaaatacacaggaactagatggtccatccttttgtcacagctccaaattttgtctctttaactccttccatgggtgttttgttcccatttctaagaaggggcaaagtgtccacactttggtcttcgttgttcttgagtttcatgcgtttagcaaattgtcttatatcttgtgtatcctaagtttctgggctaatatccacttatcagtgagtacatattgtgcgagttcctttgtgattgggttacctcactcaggatgatgccttccaggtccatccatttgcctaggaatttcataaattcattctttttaatagctgagtagtactccattgtgtaaatgtaccacattttctgtatccattcctctgttgaggggcatctgggttctttccagcttctggctattgtaaataaggctgctatgaacatagtggagcatgtgtccttcttactggttgggatatcttctggatatatgcccaggagaggtattgcgggatcccataatcagcttccaaacgctgacaccattgcatacactagcaagattttgctgaaaggacccagatatagctgtctcttgtgagactatgccggggcctagcaaacacagaagtggatgctcacagtcagctattggatgggtcacatggcccccaatggaggagctagagaaagtacccaaggagctaaaaggaactgcaaccctataggtggaacaacaatatgaactaaccagtaccccggagctcttgtctctagctgcatatgtatcaaaagatggcctagtcagccatcactggaaagagaggccctttggacttgcaaactttatatgccccagtacaggggaacaccagggccaaaaagggggagtgggtggttaggggatcagggggctgggtatgggggacttttgggatagcattggaaatgtaaacgaggaaaatacctaattaaaaaaaatgaaaaaaaaaagaaataggtaggaacaactctagtgtaagtttaaaagacattaaaagagaaactatttaagaagttcaaatttcatattggactctttacattttaaattattgatcttcaaatacctaatatcaggtacacagtaatgtgtaccaaggagaaggtgaggacgactgcccctatcctcagttttcagcatccgaggcttgtcagtgagtaagcagacaaactcaaagagtggaggtggctgacgccccacagctcctggtgcaggctgtatgatttgaagtccaggtgctaagcctgtcagaaaaatgggacaaagtatgaggggggctttctaacataccttgagcatcagaatgaatggatgtagatactgtacacaccattccctccccacctaggtgtttacattcaagacagaagcaagaggtctgcctataccaggtccctaaactctttcttcctccctcagcctcccttgtatttccaccatcccttttcccattagctttgaaccttctctgtattccactggcctaatctaaagctcatggtggtgcttgttttcataagccagagtttttgacaatgagctgtgacatttgaccttttcgaaagggctcttatgaaattatctgaggaggtatagatcagtggattctgagaagcataatgctcattacaaagaaaacaaatatatatactcacagattggtgggtgtgtaatggccaacctgggaatagttctcactcacccctttgagcacagcaacacagctccttcctcctcctccttacccccctcccccctcctcctccccctcctcctcctctgcacctcctcaatttttggggagggagccacttgctatgctgcctcagaggagagcaaaatgtgtctcttaaaagaacacagccatttgttctctgtcaggatgcctctttcatactgtaattagagtgctgtggggggtgtgagtgggggagaaagaagaatatgaaatgctcctacttccctgtggcttattcttcctgcaccacagggttttgaacccagtgaaatattgtgactgaaacatacactattatatgcgtacacagagagaggaagcgacatgtgcgcctttgagttcatgccttgatagtatctatgtgccaaactgaggtggcacaggctggtgggtaattacacagagtgagagagctgaattctgctctgtagctcttgtctttcaccgtttcctagctcttgcaacaccccagagcctttatagtcctttcctaaaaggttttgtttgtatggatatttgtttagcttttgcaaggcttgggattgaactcaggacctcatacatgctagctaagcaagcgctacatactgagctgtgctgtgctctgccttgaaaggttttaaagacaaccatgtgagaactgtcacttgtcactgcccatagtacatgctcttccatgatcatccatctaatggaagggaacagagaaatttgtggaacaaacagtgcaacattcaagaatatttgcagtggttgttttgttttcagttttatttgtggcagtagcaacaatgggttttgttcagctgaaaattgttagcatctttctagcacatggcagcagaggagaaggtggtggagaagccaccctggctctgatcaatccacaggaatgatctttgcagcactggacacatcttgtgtaaataacagagcaatggtgctattggttcttctgttctttaatataaatgtgttatgaaatccagctgagttgcatgcagagatgagcccctgatcttcctctactccaaaccctgctttgcccaatgctcttcccactttggtaaatttcacttcttccttcttggccactaaaatcctcagggtggtccttgattaccctctatatcagagaggtcagtgtgtcctcttagccctaccttcagattatatccagaacttgaatatttctcaatagtcacactctgtccaaggccaaggtcaattgaatatgttctagaagcctttgctgattctgtctctaagtcccctccagtctctcctcaacagggcagcccgagacagtcttagcaaacttcaatcaaatcttgtaattactctgctatatcccaagtgatggtgtcctagttgtactgtgaagaatcgattcttctccccctccatctagcctcacactttcttacctcaccacattcatcttccactgattcagtcatctctgtccatattgctttgcttcttgcattccatgcctctgcccagaatgttccctgtgctccaatgctgttgtgtccttgctgccacctcccacctctccctggcatgcctctcccgagatacatctgcatgagtccctcctttgtatacctcttgcccttcccatgtatactcattgaggcctttactggtcatttaaccacaaagtctgtccttccctccagacctactatacattgtctgtcttctgttcccttgagcgtgggtcagtatactccaggctgcatattattctcatctcctctgccattgccttgcatgggaatgtaacctatccgaggataaatatttgcatataaatgattgatgttgagtatcatcatatgtaggttacttttgcttcagtgtgacaaaaacacctgtcagaaaccaattaaatgggagggacagggggattcactttggttcctgttttcagaaggtccggttcatcgcggtatttaatgtccattagaatttgtcagttatatcctttcaggccagaaagcagagaaagggtgatagggttctgctaggtttcttcttttctcttttttaatccatctgtagcctgagcccagggaacagtgccacccacattcaaggtggatctttgttcctcagttaattctctacagaaacagtctcacagacatgcttggtatgtgccatgccatcttctaggctgttctcaatgtgttcaagttgacaatgaagattaaccattacaatcatattctgaaacaatgcccaggatacagcaggcacttggaaattgtgttttggagatgggatggacggataaagaggagaatcttgggaataaattatctctgttatgctatattctcagaaatggcattagtacttacaaaagacagagtaaattctatgtgctagctatcagactggatttcttgttcttgttatttagtccccataatgaccatttaagatggctgcagtgtttattctgagtttacagatgcagaaccagatttaagagatttcttcaggttatctgtggtagagatgggatccaaaccaacgtgtgtccaacgtcagagtctttcatcactgtacttcaatactaccaacatcaacttttagattaaagagcaaaacaggaaacaaatttccactcattcattatccccacttcaggtaaatagcctggccttctttccctgtatctacaaaataaaaagacttcagattagaaggtaaagcaaaaaatgttatcctttctttgagttcctatggcatctgcctctttgaatctccatgattaaaaggctatgagagcgtggagcttggcaagctaaacaaatgcacaggtcagcttccatgtgttgtaaactatgggctgacaagccagtggtcctctctttgctttagcttttctggatatgaaagttgggctagggcagataattttgtaggttgtggctgcaagatatcctgatgtgagagatctgtggtctttcctttattgttgtggatatagagcggaggagcagaggctggagatttcatttcatagaatgccatttattttccataaccaatttgaagaagaatcactgctcttaggaggcccccactaaagtgcctagtttggagtgtggataacactgcgtgtctgagcatttgcatcggaacactcaccctgattatgagagtcaacaatggatgggatcttgaaggccaggttctgttttagccatcttttattgacaacctaagtctccttaaatccttcctggaacaagtcaagggccaagacataaataactgtaatgttactgaactgtgtgaccttcagcaaagtgtttgcctgctctggggctgtgtttgcttctctggaaagtgggaggaaaagttccccaggttcataacattgaacaccgaaaacatagcggtgaacagtcttgccctggatcaccccagtctcctttccaacagaaccacggtgaaagcaagagctcccacacagccgctgacttcgctgatttctgtgtttgcttcagaatacttaagcctgacaatgttttttttcttggtacctaacctaaatccctccttccagaagcaaggatcatagaaggatattggcaaggttcccttgtgggtagcaaagccttctgaaatgatgaactctgaagattgataggaatgtgatcgggtggcatttgtgtgcactgtaaagtccctccccttccccccacctcctcacccctgccacgcatatacttcagagtgctggtggtatgagcatgtgaatctatgccaatgtgtgtgtgatgaagcatgcaagtgtgtacaggagtgtgggtaaacagatctttgagtcatacaggccagtccatcctggcaggctttgtcttcctttctggttgccatgacagcagcaagagcctctgcatcagtaaacaaagctccctggatgcactgaatcaggagcagtgctctggaactaggggataagccaagagctggtagtctttccccagagggttttacaacagttcttcctaaatattttgtcagtagatgagccaagcaactccctttcgtttatgttggggtaggaggtaaggcagcatggcccagagcaaggctttagtgaccctcacttcaggtccctaggattcagcaaacaagatgatacatcctagatttgtgcttgaccaaagctcctcttgtcattacctcatgggctaacaccagctacagagatcaactgagatgtgaattatctgtgacaacagctcctttatagcttgataaattcacaaagtagaaatcaattttcatattaatataagcatgatttggaagtgaaatctgtcttctctccttttatccctccaggcatatatgatacatgcttggggcatccttcctttgtttgagattattcatgtgatatttctactttctactttattttattgtgaaaatatagaattggctgcatataggagttgattttaacaatttatggctcccgtggaaactactggaaaacaaacgcagccacaaatataaatccaataacaaaaatgaaataagccctctaccacagtattcaaaaaccaagtttcttacatccaataactgaaatttaggaactcgaacttagcatacacatgcagagaccaaaatggagagtcagccagatccaactccagctcaccttctttcaggattctgtgtcttgaggggacctgtaagtgatcctcacaggggatcagaatgggaagaggggcaaccccatactatgaatggcaagagtaagaaaaggccaatgaaggccaattcaggtgtgtttgtgattgtcctatctctttacaggtcactgttcctagagaagacttgttctagctttgcttgggaacacagagttttaatgagataatctctcaatggacaagtcctcaccaattagcctagaccagtggttctcaactttcctaatgctgtgacactttaatacagttcctcatgttgtggtgaccctcaaccataaaattatatttgttgctactttataactttgttattttgttactggcatgaatcataatgtaaatatctgatatgtgactcccgtgaacgagttgtttgatccccaaagggttcacgacccataggttgagaaccactggtctagactgactggctagtaacccccaagaatcattctttttactgggattagaagtatgagccattgcacccagctattctgtttgtttggctttggtattattgttgttgttgttgttgttgttgttgttggtggtggtggtggtggtggtggtggtggtggtgatggtagttctgtagtttggattcaggtcctcttgcttgcaagtcgacactaagtccccagccctttgggtttccttctaatgtcagctctgactgatgaggaaacagagaagttccctccctgttcattagcagcagatgccgcctggatgctttgctctgagaatagagctggtggtgcttctgctgcctcacatgctcatttatttttgttctggtttggaattccaaagactagacacaacacatgggcactccattacaccacggatgtagaaatagaggatggaactgattatatacattcgcatcttaaacccagacatatgtcaggccatctttctactatatgccagaactctccctttaaagttcagatgttttatctatagaaactggacatcgtgagatattaaaagggccactctttgaggttaccaaattcctcaggaaatttagtgacaggatctggtctctacataaggtcaaggccatgtgttctgactttgtaacagcattatttgtgtaatcccttgaattcttatacagaggaaacaatacttagattcttatgggaaaagaccacagaaagaacatgctgccctttctcaggcctagccacctaaatgcttagggtctgatggacatgtacgatctaaggatcgaatggctacttatttctggcaaatagtggagataatattatttacccctttcccttgtaaattcaatatgaatacatggtaacaatggcctgaacacaggatggcaaatataacagcagtctgactagtgctgtgaattattttctgggtcttttattaatccaacataggaattaattaacctctattctgttgtctcaaatgaaaagctcactaaaaacaaaacaaactaacgaaactgttctcatatttctacatttctcaaatttgagctaaaacaaaaatccagtctgtagattttaatcattgacttctcacagcaagggaagagggggagacagcttaggcactgtgggaactgtaactaacctgaaatggaaggtgctactttgaattccaactctttctctttgtgatcttgggcaaatagcctttctacacctttcagggttttgtttaccagggttgtttgtttgttttacaaatataacacccagaaatgatttttaaacaaaaaatataagtgtattatatgaacattaactgcaatattttatttttatactttatggaatctaattaaagagatgtgttaaaattctcagcttctgttcatatgtgatgccatgaaggctttgcctggccttatggagtctacagactagcaggcatgcaaatgtgaataaataacttttggcacaaaagtttgttctcttttctaaaagtatttttatgcagatatttcgaaatgtagttctgcttcaataattacgagtttttaactgttttcctctgtgcacacatgtcacctgttcttgcacccatgcatgtatgtgagcgctggtgcacatgtaagtcatgaagaagtcagaggacaacgtcagtgtctgtcttagagagaagaggacagcaaagaagaaggtggggagagtcaggaaatacacagttgccaatgggcaaacagaacagagttaaagccacttgataactgaactgccttccctttcctcagtgctgcagcagccagtgagggtggtgatgggtgtgcatctttaaaaaacaaataaacaaataaacaagcaagcaagcaagcaagcaagaaaaggcttggttctatttgtgtggctctgggccagtaagatccatccaggaaactaggtagaagggaaccagacctaaactgcagagaaaagggaagccagccagaaaaacaaaggacccagaaactttcaaaacatagagaggccagacagggacttgctggctaagcctgcccctaatcaaaccgcaccatgataatagaggcaaaaagaaggtgacacgggatgtgctatatatatattaattctacagaaattgtagttaaaaaaacaaaaaaaacaaaaaacctggcatccatgttctaggattccagcaatgcccctggctccctcgagctggtacagtgatgaaggttctgccttactgaaacttttatgacccacggcagaggagtcacctgcttactgatgagcacattcgatgctttgcattgttgaacatatcctgtgagtgaggcttcttctaatatgggaggatgaataaaatggataacatcttaacaaaatcttcctcttgttgggcatgtggtcacatgcctgtgtttcctacacttgaggggcagaaaagggtgggtcaggaattcaaggctagccttcgctatattagtgagttcaaagccagcccgggccatagtaagtgggttcaacacagaatagaatagaaaggaggtgggattttgaatatcccacctaatcaaaccacaccatgagttatggtttgaattatggttcctttctgtgcttctctagtcttggatccttgccatttcaaggagccacttgacacacttcagaattagttttctgagtcagatactggaaacacttgtactgcttaccctagatgctcagggatttccccattcctctggttagatcctactgagattctcctttgtagtaaaatattaaaaaaaaaaaaactacctcaggttgaatttttcccaggccagctcccagagctagttggaagtttaagacatgagcatatatgatgttatgaaatggaaggagatgctgatgggttattcgcaattaagcagcataaccactgaatacctggggctctgtgtgcagccaggcctgagttgttctaacctctccatgtcatacttagaacataacttttaaattttaagctaagaatcaaagaaccaatggtaagaacattggtgtttattgatgccatgaaatacccaggccactgttacttcttaatggatgaaatccagaaaagaagactacaagaagcatcccataccatgagttccactacccagaccctcagcatctctggccactctccactttcacctttgccttctcttcctccacagtaccatcaggaacttactgcatcttcagtcaagcgcatgccttgtcctcgcatcctcaacttgatcacaaccattgcgagtgggtcctatgcccaaggaaaccagttcagtgtagacaggaaagctaagcaaagcagccatctttcggtatcatgttagaccagtgtccctgctccctctgctgcaacaaggttacannnnnnnnnnnnnnnnnnnnnngttctttatttatgagtattaccttgagtacagcttccaactgtactcctgtgagactatcgtagcaaagggtagctggcctggaagggtagttgtagaatgcagtttatgctaccctgttttaagctctgagtggaccatgctactagccccactcaggtttctcagatctgcagatgaatagcacgtgcgcgcgcacgcgcgcgcacacacacacacacacacacacacacacacacacacactagcttactgctcaatggtcgggctcttctaagccttctttggccatcatacccttcttttcactcccagatcagcaccctaaatctgccctcagcttcagttgctcaattacctttaatcccagctcaacaccataaatctgccttcagcttagttatgtttctttttaaaaattagatattttctttatttacatttcaaaagttatcccctttcctcccttttcctccaaaaaccctctatcccatcctccctccccctgctcaccagccccccttccctctcctgattcctggccctggtattcccctataatggggcatcaagccttcaaaggaccaagggtctctcctcccattgatgtctgataaggccatcctctgctacatatgtggctggagccatggatccctccatatgtactctttggttggtggcttagtccctgagaactctgggagtactggttggttcatattgttgttcctactatgaggctgcaaaccccttcagttccttggatcctttctctagctcttccactggggaccctgtgctcagtccagttggctgagagcattcacctctgtatttgtcgagcaccggcaaagcctctcaggagatagctatatcaggctcctgtcagcacctcccacctgctatgccaggcccagtcagggaagtggccaatggccaccctatcctagatctcacctaactggtggctttttctccctccaaagcatggcgaatctctcctgttttgagtctgctagtcttccttcagggaaaactggaattcccacctattccatccagctcattggctgttagcatctttattgatcaatcaagaaccaactgtggaacaagaccttcagtgttcacatgcagattccctatcaaaacatcagaaccactcctttacaggtagtgactaggaaaggattggtagtgatagtttctggggaaactcaatagcaggtgattggttattccccatctgataacccattggatatgctcttcttctcttttttacttaccaaggaactctagtatcatttttctacctctctttcctcttttcctccatctctttcttctcttcatgctccttctgctctggagcataagaccgtgtggggttttgtgtatacatgcatatggaagtcagagataaagagataaaccttgcttatcaggactcaggggccatctactaaattgcttgaggcaggacatttatcttgagttagaccagttgaccagtgaggcctaaggatccacctgtccctgtattttccccagtgctggcgttacaagtgcatgtcaccatgcctggctttttaacatgagttcttgggttggtcaagctaagggcctcatgcttgtgtgtcaagtattttgctaactgaactgtctcccaaactccaagatttaatctcttatgccatagaacagctttgttcttctacctgtctctgggctcttccttcctcttgaccttcacttcaactttccgtcaggcctagtgccctctgcctcattcaccttcccatgagctaggtcctagcccatctttcttcctttcttatttaatggacatcagacacaggctgccctttagtccttaacagtatgagggttactgactttcagcaccatgccctactgaacaccacaatatactggacactgcgccagcccagttgcaaattacttctctaagtcttaattgcctcctctgtccaatggggatgttaacagtattttatgagagctttgtgaggattagatgggtttgtgggcttgaaaaccctcatttaagactggcacacacttattggtgaatgtaactcaatcacttatggaaaacataagagcagtggctttgagagggttaaggattccattgtggctgaagacatagaaactaccacatggctggaaaagatcttttcagtctggagaacagggcaaggatggggaggcctcctgcctgtggttgaataaagcttacttctgtagaacactagagggagatcatcttgcagaaagtagaaatgaagtgaacaggggcgtctactcactcttgctctactctttctcttcatcatcgtggtgttatgaaaattcaagggactgtccttgttgtccacagggaatttgccaaagaaagagagagagtggagaaccgaagagcgttcatgaagctccggcgccagcaacagattgagcgagaattgaacggctaccgtgcctggatagacaaagcaggtgaggtttaggatgagtggatggatgggtaactgtgcatgcgtagtcaactaaccctgcctagtgtcttttaagactcccttcctactggcaacctagactagagcagagagtaacagtgagcgctctgtgagtgtttaggctcctcttctgtttcaagagtctaactctccccccttttaactaatcaccttccacaaaaaggaaggattgtcaaactgagttcaggaaaagaatacaaaaaccagtgctgagggaaaaaaaggacagcctggtaatattttatatttgtgtcaccctgtgactgataatccatgcattcagtaaatctagattgagtgcctactttgtgccagggactcagagtagagggttgagccaaacagaccagcatgactccaaagtttatgtctcctagaactgattcttctccagttgggaaagaagcaataaacagaataattaataactcacaagaaagtggtatgtgcagtgggaaaacagatcaagcaaggtgaggctgtgctacagctttcacaataaataaataaataaataaataaataaataaataaataaataaataaataaatacaaacaaacaaacttggagaaggtaagggattgaccatggaaagatctggagaggagaatcacagggcccaatcagatttaagggaatggccactgctgccccagcagcaaaggagacaagaccatggtaaaagtggagggggcagcgggaaggcagtcatagaccagtcacagcagttacacgtgtgacctataggtcactggactttctagtaagcagaggtgacctgctttgagattttaaaggaacatatgtttgctgtacttgaattagaccctagagaccaaggccagaggcagcgaagagatggccacttagctgtccaggcaggagacaggaagaaggaaaagcattcaccggcacctgagttatcatcactgctcacttatgggaagaatttggacccagctctagggatgggtccagacctgccacaaaggcattaatacagagccaccagatccaaggtggctcaggtgcttatgagaagcatcagtcaccaactgtctgacaataactgaagcatttgctttccttattattttaaagattggattgcattggtgttatatatcttcgttttcctccagagcaaagagtaattttttaatataataataatataaaaaattcacctggcagtcagcatcttactctattcctagtagaaagccaaccacaaatgggaagtcacaaggggacaatagggaccttgatttgatgcttcattctgcaagtcggattcttccatgagaacttgcaatgacgcagttacacttcgtgggctgccaacactccaaagccctctttaagctcaggagtcaactcttgattatctacaagggcggagaggggatatgtatgtataagagccagacatatactccctgttttgaatatccacatttctttgtcatccctgaaggcaggaactaggcattttgattgtgtgtgcatttcacccctttcttctccagcctactgagtaagggtgagggggatataaatgttgcctccctcttcccagaatggtaagtctgccttaccttgggaaggcaagcagatttgccttcaggccaggcaggcagcttgaagtttccaactgtccttggtgtcctcagtagtggagccatctgacaaactgctgaatgaactggcagaaaacccaggaaagacttctccgaagcctgaccatgatcctacccagggtcaggtgccatggagtgtggctcctcttgcagtatgctttctcagtccttgcaaaactccaacctttccctcttttccagttagcaaaggcagccctcgtcccccccccctaagaaaaagaagcactgcaacatcaaaccgtgcttcctggccctcccctttacaagtggagcgtgagcaagtcagacatatgggtaacatttccctggaaagacactcaagttcgaaagcgaacttggcaaaaggcattggtgggggaagggtggttttagcacatctagagcccttgaagtgcttctcagaaatcctcagcagccctgcacatcttcagcctttcctgggagccctcctatctgcccatttcaaagtcaggcactgtgcaaagcaaatgcaacgtctggctaaggtaattatgttttctggaatatagtttatcagggatttgattttatagtgataccctccaaatgttttataaagtgccttaaataccttatatgtctgcaagaaggagcaccctacctgtaacacttcacctgtcaatgtggaatttcaccagaggctgtacttgaagtcctaagctaaacattatgatgtattataatggctacccttcatagtaatgtccaaacctcaaaatgttccctgggaaatgaattctatatgctctcaattttatattaaggtagaatgacagcaatagctttatccttttctacttgctgttaattgctatgagtgcatacatcaaaccattgtttgataagacctgctgcaagcttttccccaacagcctgtatctttggaaatgactgtcaaagcacttatgggctaaagcagggtagagatcaaaattcaacaccatcattcttagaagggtaccttggaaaccagcagatatgggacagaaaggctgttttgttggtccttttgaaggggatggtaatgagttctactcatataaggctctccattagttgatacctcattgatgactctgctcctgaagagaagaagcctaggaaaagaagcccttaagaacttgtgatatctttttatataccaacgaaggattgaatgccctaacaccaatgggcccttcaatttgctggcacccactgtgcattcaagaatggattctgacattaaacatcccctgaaggtagcacatactctataggttaaagccttattctcaggctatctctatttcagaagccagaaagtgggatccaagatgggccttaattctgtctggtcaaatgtacattttagaaagctttacaatccctgcctctcatcagttcattgactttttttttaaaaagaataactttttttttaaagaataaagaataaccttggggaaaggatactgcttaatataaaatacaacttagaaacagtatagatcatggatgtacaggataaagtctaagatgaggctcatgagcctctaagcacacagaggtgttcacagacctggaaactctcaaagtacattcttttggaagtctgtggagatttccatacataggaatgttggattaaattgttagtcattggtaatagaccagtggccccagggtcccctctcttcctcaaaggtaggaatggataaacaaattctacctcttgatcacgtggctgagtttttcctggctaccagctcctgtccttaagttatcctgggctctttcctgccatgaatcatctcattagcatacaaaagacagctctgagccaggaaccagagacaacacacacacacacacacacacacacacacactcatatacacacacatatacacacacatacatatatacacacatatacacacacacatatacacacacacatatacacacacacatacacacacacatatacacacacacacatacacacacacatatacacacatatacacccacacacatatacacacatatatacacacatatacacacacacacatacacacacacacacacgcacacatacacacacacacatatacacacacacatacacacacacacacacacacacacacacacacacacacagattcaagaatgtactcacacactcacgcctccttagcttaagtacagctcaacaaaagctagatagaattggtggggagatacagacacatacctgcctttttatctgaagacccttgggctcttcccctcccccgccttagagccatgaagatgcataagccaaaatatagcctcatttcctggatgaggggacaaatgctgtagcctgagagacaggaagaaggtactttctgagggcttggtagagaaagaaacttaggtagaagtttaaaaccttttcacttacatcaacgtaggagattttaacaaaaaatactacttcttcctgcccgccatggggcatcagttatagaactctccactttgtcagcatcccccatgaacccctcactactcgccctcttgttctgagaagcccgcattccagtgaggctcgatttctctccatgctggtgcccacaatgagctctgaactcctgtcttaacactctctatgtctccttaagccagagctgtccctgagggatttttgttttgcgaaataatttggcatttacagatgatttaccaaaccattcgtttccatacagaggaagtcatgcttgctgaagaaaataaaaactcgggaacatcagccttggaaggtaaggaagagctgcgagacgtgctttgttagtatttgccctctaaggcggtggcaatctctcttgatcaaagaggagaaagaaagaagaggggggccgcactgggatttgaaacatttggagtctctctgtaataaaatccctcatgctttaaaatgatgagaattgagtcacgaatttaaatgccttttaaagtgatggaaatgaaacccaagagctgcattgttccagggtgtgtgatggatagagctcaatgaaaagactgtcatacaactgatggtctatgaagggatctgctattaaaatctatggggatcatcttgggaccacttttgttaccgggaaatgccattgtttaggaagagccaggacaaatagatagggagggcctatttacctactgcggttagaggtagataaactccaactgggattcaaaacctatgagcatctgcaggtgccggcaagcacagcgctgcctgccattctgtaaactccagattcccatcacccgggctccagtattaaaggccaacaactgtgtcacagggcccttgcacaaggcctcttgcccaaagccctcaaagttttgtccaggatgatctgggtgtacttatggcctctcactggccttccccttccctggcgtagtgcttcgaagggcaaccatcaaaaggagccggacggaggccatgacccgagactccagcgatgagcactgcgttgatatctcttcagtgggtgagtgatccagttagatcttcttttcctactctggatctcccatgaaaatgaagatcctgtcttttgagaagaactacatggagaaagaacctaaaggatccagaatctagggacagaattaagggaaggcatgggaatctaacctagatgacaatgatttacagaacagatgaaaggaccaggggatgctgtgtacatgaaacttggggtatagggttcttcaagtgtgacagatggatcttatttgcagatatatcctctctctcctgggtgtgacagtgacccacgttgggatacaggttgagtatccctaatctaaaaatccaaaatctgaactgttccagaattagactttaaaacaaaaacaacaaacaataaacaaacaaacaaacaaacaagcaagcaaacaaaaacaacaactatgctgtggtaccgcaagtggaaaattccacaccatgaaactttggtttctcccacagttatttaaaatattatatgaggttaccttcagcctaggcatataagatgtatccgaaatatatgtgaattttatttgtagacatgggtcccacctccaagatactttatcatgtgtagctgctagtgcagtcgctaaactaatagtctgaaatctgaactgcttctggtccatatattttggataagggatactcaactcatatatttctaggatcctgaggacctatttcttctagtgacccacatgggaggagttgaagccatttgctttaccatagtagcaccaacctacttccatcctgtgaaatttaaactaattccttttgacaccccactgatatgactacagttcaatcctaggttctcttacagattctggccgatggcaggttttttcctccccagaaaaaaaaaagaggcaggatctcactccatcctaaaaagcagaagagacttacagagcccattgctgctttatgttgccagtggcagcaatatcacaagtgcagcagaaggattccggtgtctgaagcatatctgaagggaaagggcagagagaagcctgtctgttgcagatataaagacgatcctgttaggagtcaagatgctgggtgtctgcctggtgtcccgcttgggaatctttcagtttcctaggacttgagtgcctggagaggaaaatcagggtttcttcctgtggagattaattagcccataacatagggattgcccaggtctgcaatgtggcggtcaccttgccctggtactcaagcttgccctttggatgccacctgatcgtggagggtaagcctggcgtatttttgtcatctcattcctcctcatttcccttccttaggcacacctcttgccagagccagtatcaagagcacaaaagtagatggggcctcctatttccggcacaaggaacggcttctgcgcatctctatccgccacatggtcaagtcccaagtcttttactggatcgtcctgagtgttgtggctcttaatactgcctgtgtggccattgttcatcacaaccagccacagtggctcactcacctcctctgtaagtaaacaacaactgctatccccccaagtgggtggcttggtttttttttttgtaggggtgactataagggcctaaagcatgctaacagttcacactgaaggaagctaaagccgccacaagggaggataggttctcaaataactgcttagagccttcatgatcagtggggtgtaaataatcgctgctgacatttaacaacaccacaacaatggtaacaatgagttagagttgtaccttaggtcctagaaatttcttatgaggctttcttatggttgaatcactgagacctggggagatcatctggagaacaataaatacgtcaaatggactttaaaaaggaacatataagtctgctctgaatgtgacggcttctgggtatgagtgatggccagcagactgttacatacagttgtatagaggaggatgttcagcttcttcagctaatccacagtagagacctttcttctctaagggctgtcctctgcttgaaggccattgataaccctgctcctgtcactaaagggcaactgttggttgggctgtgggtgggtgggaggggtgtcatcccagcttgcagtgttcagaaattaggctttacccaatgctgccttcttacattctgaaatctggggctcctctataaggggtctgtgttagttggagagcagaggaactaataccacctgtggaacaaacgattctactttcgctactttcagactatgcagagtttttgtttctgggactcttcctgttggagatgtccctgaagatgtatggcatggggccacgcctctattttcactcatccttcaactgctttgattttggggtaagtcctcagaagcctgcctgtccttctgtttctcggtgataggccccgggtttagataagcagcttggtctgtcactcagcatgagccactgaagtcttaagttgtaaagggagcatggatatggtgaagaaaaggcagttcagaagccagcgaatccttgcctggcagggatttgttcatttttttaaaaacctctttgggttttagtgtttgtattgatgtataacacatacactaaagtgtgtacatttaactatatagcgcaatgagattttacaaagctactcatagccagaattttgaactacttattatcttgggtgaagtctgggagagaaggacaaaggacttaattccagaggtggctttagaagaaagaggttatacatttgtttattttctacttcagttgaaaatgagcataattgtctccatatgccctcatatgcactcacccgctcttgtattagcacaacgccatgcagaacatttccatctagctgtgtactttctatataatatttaggtatgtgtgtattgctagggatgttcagggtgctttcacacacattggcttcctgtgctgcttcccagggtcccgaacaagacatggggtgttaggagttagcctgccgtctactcataaagtgacagagacggtagtgctcagctaacatacctggttcacgtcagaacagagtagcaggaccagaggtttctgagccacttctctttctgccaaacccatttccttttctgccaaagctccagtcaggtgatgaagattctgagtacttgccaatctccattttcaccaagaacagacagttctgagcacaggcacttttcagacataatagctagtaagagaccattttaaccttgatttttctcacatacatattttttcagctttgttttgaggattcatcttcattatatctccccagtccaatgcctatgatatagtcaacattccataagtgtatgatcacagaataactcagagcctgccttagtggcatgctcctctaatcccaattctcaggatgctgaagccacaggaccacaagtttgaggctagcactggctgtgcagtaaattacaacctggtctaaacgatatagtgaacccctgtttcagaaaacaaaagttgagagggggctggagaggtgacttagtggttagggctacttgttatcctgtcaaagagctccagatgggcatctaacactcgtcaggaggcttccagccacctataactctagtttaaggggattctacagttcggtactctgggccactgcactcacatgtatacctacccataattaaagtaatcaaaataactccaaaactgctacattaaagatgtacagtgttaatagaccacttgcctaccatgtgcaaagaaggtcttggattctgttctaattcccatgaacaataataatcttgaaatgttaattgcaattatgatttcctatagcaatcagaccgtatgtcaacaaagacactataacatcaagaattacaaggcttcagttcctgaaagatacttaacacaacagcagctaaatgttctgagcagtgctgcagtctggaacaatgagagaatgtggactctttctgagttttccatattggaacacaacctagaataactcaaattggttcccatgaattgggtaccaaccactcctttgtgtatccaaggtgatatgatgcaagatgcattgctattaagtttgtgcaaaagcagtggctaggccttgtaatttcactaaggccaagtcagtaaatcaatgaccagtgagcagatttaaagttaggaaggacagggggaaaatagggaatgtgtagccatttttctttggcagcttctcatgtttatagctcaatcggagttagggctgcctggggacggagagtcttaaatttaccagcgcctaatgagagttgatgactatgtactaagtgccacaatgcttttctccctcttcttactgtggctgggtttgtctcttaggtcacagtgggcagcatctttgaggttgtctgggcaatcttcagacctggcacatcttttggaatcagtgtcttacgagctctccggctcctaaggatatttaaaataaccaagtaagtggtgccatctggcctcttcctgtcacctttgaggacagaactcttattgccttctccccttgctttcccactctctgttccatttcttacattctttacatctcccttccctaaagaccaagctagaaaactgtcaatgacaacacacagagtgccacatttcccaggggatgatcatgccacaagcaccttgctttcacagatataccaaggcagttgttctcagacttgtaggcagatggcaagctggtcttgggaaagacatggttctgtgccatacctgtgatcttgtctgggttcacaggtattgggcatccctccggaatctggttgtctccttgatgagctccatgaagtctatcatcagcttactcttccttctcttcctcttcatcgttgtctttgctctcctgggaatgcagctctttggaggcaggtaagggccaggggcttctccacctgaaagaagcactcattagtctcaggactggaagcaccaaggtgtttggtttggtgtactaccatcttgtttgctcttggtctgaagagtctgtagatatgcttgagaagcaaatgtctctgctgttaatacatatgctgaaagtggttcttgcaggagggcctatccccttgaagctctctgtgaaatgatcagtgtggaatttcataactgctgaccagtccaaactctgaattttcacttgtacctttcaaagctcatgattttttttccagacacaggggctaccctcttcatagaccatatttggaatggacagcagtagggggagtggcaatggggagaagagagaaatgatgaaaactgcaatcttgagtctggggaatttggaaagtgacatttgattctccctgaatttccttttcaggtttaactttaatgatgggactccttcagctaattttgacaccttccctgcagctatcatgacagtgttccaggtatgaggccaactgatagctcagaagcactatgtggggcccatagaccaagcagtgtaagaagacaatgtcttgagtgttagagctcccattgtattccctattagaccttggagtgttcctcttatttgaggaatcgttacaacaatctctcaaactcctgtgcctcagttatcatcagcaaatggctttatctcaatcacttagtcactcttctccccatacctgtgcgtttataagatatctggaacatgcagtcagaaatcacatttgtggtttgtccaaaatctgaaatctttacatttcccagcctatgttcaggttaatgaggtaatgggttatctttccactgccatctcaaaatagtaaaaacaatttttaaaaagtttttttttttaagtcagagagaaaactcaatctcaacagtattttagaatctttcagatgaaaaggagtatagcctagacagaatatgtggctgaattagaacccagttttcaacctagaaccactgaggctttccccaataacgctgttgccttgggaatgctgtcacccctgagaacaatcaggtggtggtcaaactctcatatcagtgtgagtcccacaagacatggccagcccagagggcagagggactcagaaatgtgaggacttggagtatctcttcttttcctcttttcatattgaatgactataattcttttccatataaaaacaggattgtttgcttatgggaatagctttctccttcaccttagcaggaaatcaaacaggaagatagatagataagatccagccctgatatttgcccttcacagtggacccatttttttctgacaactttgagtcttgacctgcctattgtttctccaatgtagatcctgacaggggaagactggaatgaggtgatgtacaatggcattcgctcccagggtggggtcagctcaggcatgtggtctgccatctacttcattgtgctcaccttgtttggaaactgtatccttctaagttgttcttctgaattctgaccacttccctgcaccagcctttgaggaggaggaggaggtgtttaatggtgggtggtgggtggtggatggtgggtggtggtggtggtagtggttatggtggtggcagtaatagggcttgtataagcaaggtgagaggccataggcaatactttagcagactaaagaagacaaaattttcatcttaaggaatttgtacagaatttgtaattctgtaaagaatgcaagcattaaaagatacaactgcataaatctacagaatatacaaataataagctttgttgagtggttggagatagtacaaggtctatacaatatgtgagacctgaaatctttgtttactgaaatagtgggaagattatcacactagttagttaactatgtatctatatacagcagagcctaccatgtcataaaacttcaaaataaatagtacaaaagtgctaataccattaagtatcagctattgtgttgattttatgtgtgaaatcatttttgctgtatagatactgctttgcctattccttaccttgtaagagaaaagaaaataccagatgacaccaagtcaatacaatggtagaggaagactagcagtgaaattctttaactccaaatcttaaccctaatgctctgggttctactttgttgctgaggagggaaaaataccctgagaaaagcaacatagaggaggaaagaggctgcttcagttcactgttccaagctatggtccatcagtttgagaaagccaagggaacagaaacttgaagcagcaaatcacagctcatagtcaggtgcagagaggagagagttaaagcttgttttgagctcctactgtattcacttctctgctgtggtggctggaacctggcattggaagctaaaataaaccccacttttgtcagggtatttgcttataggatcaggaacaagactaagacactagtcaaaaaaaaagtctggaccaagaagattgaggtttgagtccttgggatattcttcatcagctgtggtcttcaaaaacttccttgttccttctgagattttatttttcacatctcaaaagaagataatgatctcttttactaactaaaaacattgaatgaagtaattattaaatgcattttttggagacagggtctcattacatagctctgtctgttctgaaacccactatgtagaccagtctggtctccaaatcacagagatctacctgcctctgcctgggattaaaggtgggtaccactatgtctggcttaaatgcatcttgtaaactgtgaatatttgtgtaagcattaggtatccagaagagtgaaactcaccttgaattgggctgtgtaacacagaggcggcacgctggggtggctgcgtttttgcatctaacctcacaaaggaaggatgctcttttcagcttttcccatgagggcttctagtagtaggaacagattataaactagacatgaagaatgcattaaaagaagctatctgatacactgaagaaaaggaggaccagtttgccacagtggcagccccttgattttcctgctactctgtaagtcaccagaaccatccagaaccagtctttatgcaaggaccagtttcatgttccacaacataggaacctcgaacaaagaggatttagagttcagacgttagagcatataggaggagtagatttcagcatgaaacttgtccatactgtgacatttgccaaataaatcctggaagctctctgggaccctaaccagaagaacgagagacctaagtcagtaccccaatatagaaacaactggtcctgtttcctaccatttttggggaaagagtggcttggtgtccactgtgtccactggtctaagtagatttccagccttccaggagggaaagatgaacactgttactcagctccctgcacatttcactcaatgatcctcttggtgtttattgctagtcatcaaggccatggctgtctgggtgctccctcaccctacttcccctcataagttgtttgattcagggataatttttttttattctatgcaaagaggaaaaatgaggaaggagggtggacacatattactgcatttcctctcttatggccttagcaacgtcttccagtgtagagtcaggaaagctctggaggtaccctcccagacttgctgaagccttttacttttcttgcctgcccaatccttaacccatacccacagacacgctgctaaatgtattcttggccatcgctgtggacaatctggccaatgcccaggaactgaccaaggtaagcactattttccaagaaggtcatcttctggacgcttttaaatggctggacagccacgaacccatgcacaaggactagtttgcctttactgagttggttgagctttgattcagtaagggtccctcatgggatatagaaaatatcaacttctctccattcgtcctcagaaggttccttcctagaattatggaatgcagagccaagaaaactattagaattctaggttttaaactctgcctttgctcctgccactgtgataatattatggcctcagctttgtgaccaaatcctcaacaggttaggcgtgagagtggtcaggggaagtgggactcctacattattgctgctggggtaatccattggccatggtcattgtagaaaagtttttattaaatcagatactacctttctcaaaaagatattgctttcttttaagggattctccgttcccagggatgagaccatattgattgcagtagggtggtcgacaaaatgggtataataatcttgccacacaggtttgattttaggaaggcacagaacacctcgaggttttctgaatgttttccactggatcagtgatgtgttgcccgtccttccccagttctcttaaaatcctcatctctatgatatgagaaggcaaataccagctttagtatatgagaaactggccttgagtcctatatctgtcagtcactggctgtgttagctttggtgaaagtgctgatctccattaataccagttttctctggtgtacaaagggaaagacagatatgtgtccctatatgtctcatagtattgcagcaaaagtcaaatgaaatactgtgtgtggaaaccacagcctgctgggaagacctgcgtactataatacttctaatcaccacctggaaagttttccttgctgttttcacttcaaacaagaatatagctgaggtagggctggggaggtgcctcagaagttaagagtgtccagtgttcttccagagggcccaacattggttgtaaggaccatatggagtgtctcacaactgcttgtaactccagtttcagggaaatccaatgcccttttctggttcccatgggaacctatatacatctctgtctttctgtctctgtctctctctgtccttgtccctatccatgtctgtctgactctttgtctctgtctctcactctccctttgaacaactaaaaatgtggatgaagaaatgagacctctgcctaggaactcataaacaatgcagggaagactccgtgacagggttaaacattttcttctgcttacctcatcttgcttggtcttcagagctcctggcatggaatcaaaggaagctgctctctctatggcaattctaggtaaagctatctctgttttgtgtctaggatgagcaggaggaagaagaagccttcaaccagaaacatgcactgcagaaggccaaggaggtcagcccgatgtctgctcccaacatgccttccattgagtgagtaggctatagaaattgaccctgggcttctgggctaaatctagtttatcagtgtctatgatagtcagtcttaggaagggacctacctcttctgttctatgaactggtcacagtgcatagtgcagtcttacaggggaggtaacaagaatagtgggtgggggagggcactattcacaaaaatccaagagggactctatgcataatagaagcctaaacttgcaggagaaagttcaagttcatgttctgaaggaactgttcctcagcaaggtctactgtgtcttatagaacctgaggggaatagaagatagtaaggccattgagagtggcacagccagggcagccggtacggaagtcatggtaacacttaacatggaaggacatagctatatgttaatacggtttccactttaaaatatcactccactccacggaaaatgggttgtgaaggtccagtatggccacagtgagacacagctagctgttaaagtggtgtgggtgattatgagttagacacagaaggtagcaacagaggagaccataatattgctcactctgccttttgaaatgtgagtcaatgggatacatttaggtattgaatgtagtagggggcaataaaaatttctcaccggttttatagtttggggacttaaatggctgcatgaagggtgggaccatttattgatccttcagagactgtggaaattcagagtttgttttggtcacattgactgtgaaatgcttccaaggcatccaagtgtgtgaataggctattggctgcatgagtctggagcattgaggagaagttgggattaaaataaagatttgggggaagtcatttgcatttagatggtatttaagccagcagtgtgggtgagatgacccaggaagagtggggacagggaatgagtggagctgaggacagaggctgtgagcatgcgcttctctgccagaggagaagctggggaaagaggcaaggggatgtagccaggggacagagaagggaccactggatttaacaagacagagctgttttagtggccgtgctagtagcctgataggaacagtgtccaaatggaacagatttgagagtgagttggaggttgatatgaaggagacacaggatcactctgccagaatctgtcttgatcagtgctgcatgggagaacttggggagtcagtatgggcccagcacaggcctggcctctgcacaataagtgggggcagttggtggacaagaagcacagaatttcttcctgatgataaacaaggcatgcataaggctgtgtaaggaatccctgtgtgagagatcctgtcatgtgggtggggacagtggtaatccatggagagagagaaaaatacagtctgagctagtggcccctgtcaactgttacttaaagctagagagaaagaagtccctggtgcattggtctttggaagggaggaacttctgagtagtctctgccttacccactgggatgctccccatttttatgtggtgtctcccatatctattttactattgatttgagtttgctttccaaagctgtgaaggcttgcctgctaagccccttttctgtgagcctgagaaataaaaagaaatcattaaagattgattggagaataccaaacaactccttccttttcagactattctctggtctgagtaatttccaccctgctctcctgaactcaaatattttggttaaaatcacatacacacaggtatctaaaagtgcagatggatagaactggctgctccaggagtgggtggttctatttactgagatgaggaagcctgcgggagaagagggtttggagagatgtgattggagatgatgtttagcccagagtaggaactatttatggaatggaagaatgaatgaaatatgggtaggcacagggctgtgggaaccaagcagtgaacaccagtgcagagtgaaggtgacgcagatgctgcaagcatcctcaagaagatgacaccaagaacttgggttgctgtccacatggtaatgtggtgtttattgttgctatgggtaaccacaagggatgcatgccttgctcaggtgtgcagctcattcaactgatttctggtaagcacataaccttggaaagaacattatcacaaacccaagcattccactgttagccttaattctgtcaaaaagatgctccgtggcgttaaagaggacctcttagttccgcagagcctctgtttccccacgtttggaatgagaaggacaactgttctttctgcttcacaaggctattgtgggatatataccagatcacatgcatatgagttgaagttagtggctacttgtctgtgtggtttgagggtatgagcgcaaatttgggatgttacctacatgaatagagaggtaaaaatcaagtgttaagtatgtgtctggctgtatgaaaaagattagtttctcttttgcttgaaatgtgtgtgtgtgtgtgtgtgtgtgtctcagagagagagagagagagagagagagagagagagagagagagagagagagagagagagagagagaatccctctatatacttacacatgctcctcgagggctggtgttttgcatactcaagaatttgcaagtagatcatatgatgtgcctgtcccagtgggtatgcatgctgcctgtctagagtgtatgcttctatttctatatgttaccaatgtttctagccccccaccctgccccgtgcctgctatagtataggctgctgatgctgagagatatggattttgccaaggagctcacaacatctctataatggtgtctttatcaatgagtgcttgtgtgtacacatgtacatttgtacttcttccagatacccccaaagagaacatagactggctgcctctgcttcctcagactggccccttctataaggcttctttccaagtgcatgagttatagcagttgagcagagctcattagcctggcatgttctacactgatgggggtcttctcaaacaaagaacatcatttacctattttccacacccaacagggctcactgggctgaacccgggttctctatctcaaaggctagagcaagttctcagctagattgccctccaccctagctttgaccctgtgctgccacactcatttctactcttgcaacgctcatctatcctgctacttttaccttccctcgagagtgtatttgaatggatgcaatgcatatgtagaagtaatatttctttacaccagtcttagaaaatcaattctgtgttttcccccagaggaatagagcaaaccttaaaggcttcgcccttggggaatcattcacatcctctaaagtgtggctctgtggcctctgaagtgtgaccttgtccttagccttgggttgctctatagcctcactggtgtgcatgacagagcatttgtttcctccgtggtccataaaattgagccgggatctgccatacagtgatgaccttaggagtcaatcttgtgtggatatccttggtcacccttgacatggtggggaaggggtacttgtcaaagcaggactccagagggggcagtatgaactcactgcagcatgctgtgaagcattggaaggtctattttacacgaaatagtctatcctctgggactttgcatgtgtgcttcaagaatgagatctgggtatttgcatatagcaaggactcagaagccaccgtgggagcactcgaggtgggggtgtctacagggggcaaagaggtgcatggaagccccatggacatgcaaaaaagactctggcttccctctggacatctggtggctgtggggcttgtggttcctataggttggggtggactgaacctgttcgtttttcttccccagaagagacagaaggagaagacaccacatgtcgatgtgggagccacgcagcagccacctgtatgtgtgtaccggtctgcgtgtctgggagtggtcctgtgtgtgggcatggggatgatgtggttttgtccttaccatggacaaagtgataccaagtgtaaatgtcagtgtgtgccttggtgtgtgggtgtgtatgcgtgtttcctgcacatctgtgaacgtgccccactctgcacctttcagtgcgcttctatcagtgtctaaagtatgtgacaagtgtgttgtttgctctcgtgtcgggcctgcgagtgggcacgtgttcacattggcaattagtgttggtgggtgttctgttacatctctgtgtgggcctccatgaaggtgtgtgtgggcccatgtgcatatctctttaacagttggtgggtgtgtacccacgggcatgtgagggaaggagtgggtgtctgcccttccagctgaggagcccacgcctgcgttctgtgtgtcatgtttgtgtgttcctgctgccttgtgaatgctcattgggcctctgagctgaaatgctccacagttagttggggcgtcgactgctggtggtctctgaatatagtcttttgtgggtttcattagctgttgctttaggagcccacaatctccctacctttcctgggatgctgccattgttagaatatagtggctgcttgccatggtcagtatctttgttggtctctgaatatggtgcatctcagcccctgatattccaggctaaaatctggatggaaagaggaggagaatttctgaccttgaaggaagggtcatttgtgggtacataagagaccccagctgatacccttaatcaaaggagtactggggagggatggctggtgagtctttttactgctcgctggtcttggggacactaggctcagtcttgggctgacccatccttaccaaatggctattgcactgtagaggcagggactgaagtgaaagataccctatacaggacttggaggtactggtctgacaactttcttctgtgtagccactctgcccctggcatctctgtgcttcttgtctgagatcctcccattagctccttcatcatgacccctgctcaccatggcccctgtaaagctgccatctctgacttctacatgtgctaccaggttctaactgcagcccttgccctttcttctttgtcaggagggagcggaggcgccggcaccacatgtctgtgtgggaacaacgcaccagccagctgaggaggcacatgcaaatgtctagccaagaagccctcaacaaagaggaggccccgccaatgaaccccctcaatccactcaacccactgagtcctctcaaccccctcaatgctcaccccagcctttatcggaggcccaggcccattgagggcctagccctaggtctgggtcttgaaaagtgtgaagaagaacgcatcagtcgtgggggctccctcaagggggacatagggggcctgactagcgccctggacaaccagaggagccccttgtccttgggcaaacgggagccaccgtggctgcctagatcctgtcatggaaactgtgacccaatccagcaggaggctgggggaggagagactgtggtgacttttgaggaccgggccaggcacaggcagagtcagaggcgaagccggcatcgccgagtcaggactgagggcaaggactctgcctctgcatcccgaagcaggtctgccagccaggagcggagtctggatgaaggggtgtccgttgagggggagaaggaacatgagcctcacagcagccacaggagcaaagagccgaccatccacgaagaggagagaacccaggacttaaggaggtaaaggagtcccaggagggcactgaagagatgtagttcaggtttctgtgaggaattctgtgatggaaacctatatgggcctccgttttcccttttataagatagagatgatgcctaaacaccatctaaaagtcacggcttaatttaacaggcaacctaacccctgcggaaacaatgttctattccagagcagctcggctgagagtggagcctggatagatggatagatgggaatcagtcagtgagcatggcccatgagtgtttgcctcactgtgtctggatgcagatggaagatagaatatgctgtcaggcctgctcctgttccttctccctttccttttagccaggtgcatccgccactctagaacagcttctgaaacataaccatctcttggtctttattctcaggaccaacagtctgatggtccccaggggctctggactggtaggggctcttgatgaagcagaaacacctctagtccagccccaacctgagctggaagtggggaaggatgcagctctgacagagcaggaggctgaaggcagcagtgaacaagcccttcttggggacgtacagctggatgtgggccggggcattagccagagtgaaccggatctctcctgcatgacagccaacatggacaaggctaccacggagagcaccagtgtcacggtcgccatccctgatgtggaccccttggtggactcgacagtggtgaacagtgagcacagtccctgttctgtcaccccctcccacccaactggagctgaagacagctggctctggggcccctctactaaagctctaacaaataatagaaaggcactccaacaggactaaaacatttttcacagtcttgagacagtgttctcctacagagttagacttcccgcaactgtatttttttttttatcctgtagaacttggtcctatgagtcttcaaagtggttacatgtgagcttataggcagttgcgtcctggtgtaaccagatggcatccttgtgacctctgggagaactaggagatatcctggggtagactagcagataggtgttgctatggttactgttctgctctaaaggcctgcatctttggaggcctcggtgccacctataatagattcccctgagatcatccctgcgctaacatttcctgactctattattcctatcaattctctctctctcctaggagctctcagtcacactttcccatcaagactctttcatgcagaggttaatctcgaaacactgacagaaaactcaaggggaaagcatttaacctactaccttactgggccagtacccaccttttcctggaccacatttctctcttgcattcatgttatccctgtcctcaccctgaccacatattccatgatgacatcaatcctatgtccagttcctgtattgccttaccctaatcactgccttgtacctaatctctgccccagccctaaatcccttccctgctttaatcccattcctcattctgacttgaaccctgcacctcttccctttttactcattccctttattcttatccccacatgtcacccttgcattaatcccacaccctataatctgccccctaccctatccttgcattcatccacaggctatccctgcccctacacccatctctgcattaatctcgctgctgtcctgtgatcacaggttatggtcatggggttctatcagtgtgtgttttccttctctttccatcttctgtcctgtgacagtctcctcgtctccctttctgcctctctacctctgcttcccttccactcttgcttcaaatcatctgccctctgaaacaacagatcagctttaaaaaattgtaaatctcccatgccccgtgcttgctggggtggactggggcatgtttcaggattgcaggtccacagtcacttttaatgtctgtctgattttgtacttttataaaataagaagtgctttggagcctctttttataagaaacaacattagcttcaccatctctctgttttcacgctagggctggtgtggatcctgcatcacagtacagtatgcgataggaagattttaggtacttagctattagaaggtcccaacatgggccaggaccataaaggtaccatgagtctcagggtagtgccacttcttggccatagggacgtgggggtggggtggttccccaggctttctctccacactgacagctttcttcccccccacctcctacttgagcacagaaacagaaagtagccacctgacattgctacgtgacccctgtctgcttcttcccccccagcactggaacgcagtcacaggcatatattcacatgaatattacatttccatttctatattcatcgtgctggagaaggtacagccagagaagccgtatgccgagagtaatggtttcttgaaatcttccactgcagagatcttctgaaggtgtataggatttcagattagctgtatgaccttagggaaggcatgtagactctgaacttcaggtgttttgtgtttttttttaatctgtataataggaataatagtgtataccacttaggtgtggttaatatgaaaattaaagttcagtggatgagctgaaaaagaatgtggagtcgagacataatttctgaattgtgaaagcttggtagctgcagtggtgtgctgtttccgacactacaaaagtccagcaataaaagggaagctatggttcttacttctatgacacaaaaggctgtagtatgtaacgtgggtatgggtagggataagaagtggaagacttgaggtagtcctcctctggggaggagtcctcatttggaggactgatgctgtcagggtaccttcccagatcatctttggcatccccttcctatcctatccattctgttcccaactgaaatgaaaaagcacacctgtctgcgggtttctgaagattaaaacctttctgcttgcagttagcaacaagacggatggagaagccagtcccttgaaggaggcagagactaaagaggaagaagaagaggtagagaagaagaagaagcagaagaaggagaagcgagagactggaaaagccatggtgccccatagctctatgttcatcttcagcaccactaacccgtgagctatgctcctgttgcatcccactatggtactaggagagagagccagtatttgagccagactgggatgatggagaggaagtagggagccctgttatcttcctgagtcctcctggcagagagtagctagaaagggaaatatttggagcccaataagtaaggtagggcattaagttgaacagcctctcatctctgtgtccatagttcccacggtaactaaagacagaatacaggagaaatatcacaggaaaagacccttccttgctctttgatcagcagttagaataaggaaaatgaaggcagtctccttgaggatgtctacagatattctagaagaggaaacactatggaccctaagatggtcaaacatctactggagtttaaaggtttgatacctctgttctgcatatggagttttggaaagagtttcctctcccagggcagaggtagaggaatgaagaaggtgtgttagagaagaatctagaatgttaggttcaagaaatatggaactaagaaaagggtgtgagccttgtgccctataattggcatatagattggcttctgagacaggaaagcgaccttctgtggccatgtgggcagggttcaggcacatctgtgggatgggaggaagccgggttaagatgccagatcatcaaaagttgtagtatagaataaagatatttccatcagaataatcaggaagccatagaaacatcctcatcagggcatttgtttcttgtgtttcttggttctttatgatttcctaggcaggtcctggtttcattgcttaagggagaagacaccaagatgcatcagaggacatcacatgccgctggggattgcgtagtctcacgtggctgttcctcacggctcactcatgtgtgcagataatgaatcttggctttcgtgacatagcctctaaccaatctgattacctttctccaccagggcctggaatcaaggggtggtgcttgagaaattaaattgctctccctggtggcttcctttgtcaagggcctggctagctggaagaggccaatgtaggcttatgagaagtatgaggggcaggcatgggaacgatgtagggccagctcaacagggtgagctcaagaggcttttctcatccacaggatccgcagggcctgccactacattgtgaacctacgctactttgaaatgtgcattctcttggtgattgcggccagcagcattgccctggcagccgaggaccctgtactaactaactcggagcgtaacaaagtgggtacacggttggggggggggcgggatttgccaatattgttgatgccctgggatcttttctatccagagccgctccctccaacatcagaggagaatcaagataggctaacaggaaggtttctgggaatgaaaaaagatagagaagttgtgcttattcctcagagacaagtatgagccatttcccacacccacaaccacaccactatttttaagctgcagaagcaggcttgacacccagaactagctaggcttctgagagggttcggctgctattggaaggtctggatgtaggctataacatagaaccataagtgatgtgtgtggatgcagggggactgtgggtctaccacaagtcattgacttatctcctgggaaccccacaggtctggagagaaagttttatggggaacaattcagaccctagaagttaagttatggtcaaagggggggaatagcttctggcccacgtggctcaagcaggctctctggtcccttttttcttgttttccctttttagcctgctattgatagtatgaaaaaatccctctctgtgttctggtgtgggagtttttgggagacagggtcatgcaggatggaatgggtcagggggcaggtatgcatagagctcagtgaccttacacggtcttctttgtctcgttcatgtgtgtcttccaggtcctgagatatttcgactatgttttcacaggagtgtttacctttgagatggttataaaggtaaaagtttccagagaaaacatggactctgaatttcagttgtatcaatggtcagctcctttagtttagggtactttcccaataatgcaatctcctcgtctatgacaataccaagagagtttctccaagccctctctcacctcagtgttctcagtaggccatggctgtgtggatgtgattaaataatgtagctctcttgtcatggcctgaacaggaggcaggtagtaggtgagcatacagcttgagtgtggtgtagttctgcacaggcacttcccttcttattcagagaacgtgtctggcaatggtttagggagatgtctttccagactccatctaactccagactccatctaacatcctctcccctctagactctgagcatcccaacagaactttctcattccaagtttaacctgtctggggtttctacccatccatacaggtgtggcagtgtttggagctctggaacatagaggagcgggaggttaaatgggattctgtaatggcagagaaatctgcttaaaccctatatgactttgagaaggggtctgagtcctcactgttcactggagatattatgtgattatgagaagaggtttcagacctcatcattatccagagtttgctggatactctccttactcctcaggttctgagtttggctattgtcttacttagggtttctattgctatgaagacacacacacacagcaattcgtataaaggtaaacatttaattgggactagcttacagttaagaggctattccattgtcataatggcaggaagcacagtggcatgcaggcagacatggtgctgaagaagtagctgagagttctagatttgaatctacaggcagcaggaagagagagagactgagactggcttgagcatctgagacttcctccagcaatacccttcctccaacaagaccatgcctacttcaaaattgtcctaccttctaatagggctactccctatgagcctatgggggtcattttcattcaaaccatcatatctatggagacagtggcagtagagccctgggaagggaagctaggtgtaggtgttaattacaccaggagtctaatctatgacggttcaaacccttgtcctgcagatgatagaccaaggcttgatcctgcaggatggatcatacttccgagacctctggaacatcctggactttgtagtagtggttggtgcattggtagcatttgctctggcgtaagtagatgcttttctgttctagtcccttacctttcttcttctattatccctggttgatttgaccctgtctccaaagagcaacactctgagagtctgcttaccaatagttctttgcagaggccttaaggtcttacagttccagttcatgtgtcctaaacaaaaaaagcaagattgaagagcatcagtaggaagaagggaggagccagggcattatgaagaatgatgcagaggcagagcagaaatggggatcccagaatcctggtcatggggaagaatatcctggaacacatttgagaaagacagatgcttccaggaacattttaaaaacactacccaggcagggaaatgacccagcaagttggatatcaggcttctgtgctcaatctataccctcttctaccacaaacaggttcctttttgtctggttagcatgtaggcttcctcaaaaccatccttccagcctttttgaaccttgtcctctaggcaagactgaacacacttttcttctgattgggtagaggaagtatttggatgctgctttcattgatgctgcagcatcaatgatacaggaaaaggaaagatgtttccatagcgttgcccttcgcatctccaatgtgttagaaaacaattgttctctactcactttctccacttcgctggaagtgtctatcccatatccacactggcagttaaataggcagggtaagaactaaggggtcaggggcagcgatgccgtgtacagaggtgagagttcccagatgtgttaagtctaaaattttccagagcctggaagaacactgtgcccattgctgcaggagcggtgggtggccctccaacagagccagagtatgggtgtgcccctgagacgggatggtagcagagtattcattgtgtcttgtcccaaccatgtgcacaggcatcccaataccattagagcaatggagagtcatctttgccttcacataatcaaatcttctgtaatgtaaatgtagctgaactgttcccaaagagatttcacaaaagtgtggtatctccctacctatccagatcctgtgtgggttctcacagcaacatacaaaaaaaggcaaccccatctctaccaagggaactcccagcttctcttcctccttggcatgattcactaaggtctacttttgccttaagaatgccaaccttgttctctgttcattaaagacaaataaaatatgatcatcggattgttaaaaggtccagttctctttccatctcctcagctcacttgtatacatctttcattattgtttctcagtagcacactctgcctgtcttttggcagtggacagagagaaaagcatagtgggcagaactcaccagcacttttcagaagaacataattcacaggtgacagggcagaagtaggaaggggacatgtatggggtcaatctaagcctagcttgaatcccagcccttcttcttcttagcagcttatgtctttgacccattgtagcaaaatattaatattcctaacctccatttcttatctcttaaaatggagacaaaaataaggcatgcagagtacttaacaccagggctggctgttggtgtgaatgatcagtacatgttagtttgttgctttaaccttctaattcctcatgacatcaaacgtggcagcaggaataaattatgtgctgctgtggaatttacacatacagttcaagacagatgaaggctgggccaagactcaactgcttccatccagctacctcttccccacaacccttgagcctaagtccctagcaaccagctggtgtactggggttggaggataggaagtggccttgaggggaagcccatgaatcttgtcctatgccccagtgtccaaatgtttatctttgggctcttttgacaccagtgtgctctagggttgtcctcggcctcattttctcttgtgctccttgagaactggcagcaggtggcttcggtgctagaggcaaggagacccttattagcccaagttcagaagactctctgttgtcaggtgtactacaggggactccagaaagcctctggttccagggtccaagtttgtaggatagattatgagctatgatccattctttgcctttagtgaaatcttatcttggaccttatttctctctgaactgtgcatggtccttgctccttctccattgttctcttttgttgtcacccttcctagcttgccatgcctcttcccttccttgtttcttctcctttgaccctcatcacattggctaaggtcctggtaacacttcccgatgttcatatgcctataaatcttaactctgtgctttctctttccttcctgagggccccagagaattcagctcttctaccacatatgacaggatccccaagagttccacctgtcagcaaccagggtcagagaatggaatgaagtcaccaagcccatgatctacatggtcagatcaggccaacaggaaaccatatttggggttatctggagacctttcaagtctctatcttcttgttataactttcattctcgtgtcctgtgggtattccccagtgactgctcactgcccacatagccgttttcacaccccagtttctctccttcccccttgaaaattgaatgttcccctagtgaggcttccacaaaagtgattgctttgtcagtgtgagcaaccaatggaggttgccacattagcatcattatctggttccccagaaaccagaagtgccttattatctcttctaccactgccagtgaaagaagccagcccaattccccagagcagtgctactgaccaagggacagactcccactaaatactcagagaatgctgcaaagtccagagtctgtctgctgcagagatctgcagctcccaccatctttgctctctacaaacattcatgtgttgtatgtagtggctgaggaaatctctattcaatgtacatcaaatataatataaccctggcattctatctggaaacttagttgacttgttaaaagaaaggggcgggggtagggtgtttttagtgtgggaatatctgggtttaaaaatatcccattgcaacttttctcttcttgccagtccattcttacattataaggtgcttatgagaacatcgggtgctccttccaaggccaatatctcctagagaatgagggagcaggagactttagcagagattgataataactccccctgaaactctcatcacactatcctgttttttatttttatccacatagagacagatttgttttctgtcaatgtcccaatgtcttttcctctttgaggtttcaagaaaagtctgaggaatgactaaatccacgaaaccttttgccttgcttctctctagaaagggcacatttgtcttctctgcatggttgtcattttctcctgaaacactgaggcctgctgtcctctgtctctacagtctgttgctattctacctactctttggcctcaggtgtgagaaggcaaagatggctacagcttcatcatttctagatacctgaacatcaagcgcacactttagggctcccctgccctccagactcagggatatagtaagcaagtcagggaaccacaaagtaggttacatcttgagccttaaacctctactctgaaccatgaagcttaccctttttaatacccactatgtacaacagtttacttgattagcggaattatatgaacagatgagcttctgtgtgcattctcaataggaaatttgcagctatcactgcttgtagctctaaacatttaataataaaaaaaaatgtgtcaatagtttagcctccaccttccctacctcctatgtggcagagtcaggcaagctctctggtgactgatgccaggattttccataattgtttgctgttatagcaggccatgaggtgaggtcgggactccctggcacacaagggaatctggccacacttggcctgtcattatttagtccttggccagaagcaaaactatgagtcagctagcttgtggatgccagagggaaccagactgcccatattagctttcattgaagtgtgtcactttcctgatacttgacaccctgccctggtggctaagaggtatatatacagtctctcgaatgcactgagcacaagccaccgcggctgagctggttctgagttcattcagcgaaacccatagacacaggcaatctgagatttggaagtgccttctggggcccacagcgttcgtccctctgggatagttcatctgtggggggttgtgtttctgaagctgaggatacacgtgtcattggaaaggtgtgactatttggaactgaaatatgtgtgctcatttacccagaagggcttagaaataccgaacaaacctgtcatcagaacctagctatttacacacaccccccatttttttcagtgatgcctgggtctaaagtagttcctcacaatgaggcattttcttgactgctcttctagaactaaaaaggagagtttcccaaagaaatctattactatactttgtcttgaaggggcaaaaaatggacctatttactacagagccagatatcgcatccagttctctttctcttactcaggaagaaaatgaagcttgaaaattgcatttagccaccaggtagcccattaactgtgaatttagagcttctgttgcaaaggaattggaaatgtccagcagtgagcagttaggatgctgaccctaagaatctggtttctcgagctacttcatctaactttgtgtctgggtcaggaaactaaagttgatcagtgcttgtacctgcaatggggattccattgctgtattttatcctgctggcctaaagatagggagagagagagagagagaaagagagagagagagagagagagagagagagagagagagagagagagagagagagagagagagagagagagagagagaagaggacacatggaagagaatttccattctacttgctcttgtaattaaggtccagaatatagcaatgtagcacatctgaaattgacattgctaagaagcagtccatgggatgtttagttgtagacattctatgggtgtgaattctcaagtatttctgtttatacactgctcaaatttggggtatgttgcaagtgggacctcatccaatggacacagaaataggctaaatggaataaaccaatcaggggtcccagctctatccagttgttgaaccaaccagacccatatgcaaaaagcaccctctataggaagtgagacttcatggctacaggaaaagcctggttttctgagactggtgaaaagtcatcatagtagccttcatgcttaaaagtaggctgtagagctctcaggatagaaggttgtataacgggtcctaggaagtttctgccaagattgtgtgacctgctaagcatgtgttcagtcacaggacacaaccttaccgtataaattagtctgcagctgaggagcggcaccgactagacgtcagtgggcaaggcctccctacaaagacgaaggatcattggttatgtttggaacacagggactaaaaagaaatacaaatcaggtcactctcctgcagtttaaataacagaactgctagcagacagatgcgctgctgcctcctcctgctgcttggtgcttggacaaaaataccttccagttggagtagagtgatgtgtattcaatgcattagaagttcactgaggtcaatatgcaaggaagaaaggattatgcaccaaatactttgcacaggatgagttttgtggttacagaacaaagatgacaggtaaactacgggtttaaggtacataggtgaccaggagagatgctgggggcagaagagaaaaatcctcaaaaggcagcagctaagagtaaatggtcaaagtgctgaatttcctttctgcatgcaggcagctgaacttgatttcccccacaccttctagaaggacaagtactctttatttcgttgctaacattcggagagcctggtggttagagctctggctgatgtgactcatgcacataatgagtaaatagcagagccaggtcctgagcaaactcactgtgcagaattcaagtttactgccttttctagtatgttaagctctctcctgccatgctgccatggctagttacaacctattaatttcctctgcagatccttcagtcttcacctaggtcagggaaggcttgcagggcagatggacaaaagtatccataagtctatctatcttgatattgtacctgtaccttttccttcccatcaacagtctctacaccagtgagggggagtaaggcagacaggttaatggttgagctgagtaaatactaatctctgttgctgttctatagcaatcctcagtggttcccatttaaaagacattaaattctaatgtcctaggcagatttgggtctgaatcttctgtcttaactctctttaccccatnnnnnnnnnnnnnnnnnnnntttcgttgctaacattcggagagcctggtggttagagctctggctgatgtgactcatgcacataatgagtaaatagcagagccaggtcctgagcaaactcactgtgcagaattcaagtttactgccttttctagtatgttaagctctctcctgccatgctgccatggctagttacaacctattaatttcctctgcagatccttcagtcttcacctaggtcagggaaggcttgcagggcagatggacaaaagtatccataagtctatctatcttgatattgtacctgtaccttttccttcccatcaacagtctctacaccagtgagggggagtaaggcagacaggttaatggttgagctgagtaaatactaatctctgttgctgttctatagcaatcctcagtggttcccatttaaaagacattaaattctaatgtcctaggcagatttgggtctgaatcttctgtcttagctctctttaccccatgaacttctgcttccttacatgtgagtggagatgagaaacaactacatttggtcctgtgagaattaaatacagtaaaatatgtttcatgtccaatacagtaccaggcacttaagttgaataatgagtggtagttattgttgcctaccaactaatggtccaggcacatttgcagagtaactgaccttgttctaagcttgagactctgcctcctggtttgtaatctttcaagcctagctcttccctcctagaggaggatagaggccatgatacttaaaagaaggaggggctcttcagaacccagtgtccatgttctgcccatttttttagcagaaatctgctggagagtaacatccttggaggaatgagcgaacaggatgaaagtaaaggcctaatgattgctcatgacagagatggagggcaacttggcagctgaactgggaaattctcctcttacactgatggggcatggggaaactgggttttgttattctaaagagcaaataagtagaaaataaatggttaaaaaaaatgagtggccccactgagtcccaattaaagtgagaccagggcatcctagcatatgaaattatcttagagtccattttaaacccattaaagttcactaatgagttacacagtgtaaaaaaaaaaaaccctcattatacagttagcaacaaagattaacaccgttatcaagttatcaagtgagggttttgttttggttttttttttttgtttttggttttttttgttgttgttttggtttggtttttggttttggtgttttgttttgttttgttttgttttgttttgttttgttttggtggtgtagggggatgggttgtaaaaagtacatgaactgtttgcaaaacaatctgccttgaagtgccagcagagcatcgtgtcttagactggcaaagcatggtctctgcagctctggctttcacaggggatgtgagggaaaagtgctttggctttgtctgggtgtaaattatatattttagttagtgatggtgacgttgctgaagttttccttgactctgttattttattttatgtttaccttatttcatgttttaatgttgatttattgtggaatttttgttggttttgttttgttttgttttgtttgttctttgtttttttgtagcagggcatcctgtagcttgggctggacttgtggggtgatgctgccaaagatgaccttgagctcatggtttattctttttcaatcctcgcatttcaaattgccattttcaagtcagtattgaccctgtgctagtgaccgacaggtcggatgcaaggatgctctcctcaacaccaactcagaaccatggtttttgttttgttttgttttgctttgcttgtttgtttgttttctggtgccaggaattgaacttgggccctcacatatgctatgaaattatagtgttttagtggttcctctgcagtaagcacattagaatttccctttgttccataccgtattttctaatcactatatatataccctaacgtgtcaaaaagtatggaatgttggtacattctaatattaacagctaggtctgtcaaactattggggttacttggcccattctgactcccaagacctgagcaaagataacagttagacataggcttcaggtttgaaaattggctattaattattctgtactctttaaaacaggtcacagattttgtgagcttttctcttttttcattaattaattttacatcccagtcacatcccccgcccctgctctcctcccattcccatcttccaccccctctttctcatcctgggaaagatttgggggtgaccctagctgagactcctagcaggagatatggggcttgaagtggccatctcctgtaacaaggtaggacttacagtggagggaaaggaacaccaacacacccataaaaccttcaaactacaagatatgcagggataaagatggtgcagagattgagggaacgaccaactaatggctagctcaactttagacccatcacataggaaaagagccannnnnnnnnnnnnnnnnnnnnnnnnnnnnnnnnnnnnnnnnnnnnnnnnnnnnnnnnnnnnnnnnnnnnnnnnnnnnnnnnnnnnnnnnnnnnnnnnnnnnnnnnnnnnnnnnnnnnnnnnnnnnnnnnnnnnnnnnnnnnnnnnnnnnnnnnnnnnnnnnnnnnnnnnnnnnnnnnnnnnnnnnnnnnnnnnnnnnnnnnnnnnnnnnnnnnnnnnnnnnnnnnnnnnnnnnnnnnnnnnnnnnnnnnnnnnnnnnnnnnnnnnnnnnnnnnnnnnnnnnnnnnnnnnnnnnnnnnnnnnnnnnnnnnnnnnnnnnnnnnnnnnnnnnnnnnnnnnnnnnnnnnnnnnnnnnnnnnnnnnnnnnnnnnnnnnnnnnnnnnnnnnnnnnnnnnnnnnnnnnnnnnnnnnnnnnnnnnnnnnnnnnnnnnnnnnnnnnnnnnnnnnnnnnnnnnnnnnnnnnnnnnnnnnnnnnnnnnnnnnnnnnnnnnnnnnnnnnnnnnnnnnnnnnnnnnnnnnnnnnnnnnnnnnnnnnnnnnnnnnnnnnnnnnnnnnnnnnnnnnnnnnnnnnnnnnnnnnnnnnnnnnnnnnnnnnnnnnnnnnnnnnnnnnnnnnnnnnnnnnnnnnnnnnnnnnnnnnnnnnnnnnnnnnnnnnnnnnnnnnnnnnnnnnnnnnnnnnnnnnnnnnnnnnnnnnnnnnnnnnnnnnnnnnnnnnnnnnnnnnnnnnnnnnnnnnnnnnnnnnnnnnnnnnnnnnnnnnnnnnnnnnnnnnnnnnnnnnnnnnnnnnnnnnnnnnnnnnnnnnnnnnnnnnnnnnnnnnnnnnnnnnnnnnnnnnnnnnnnnnnnnnnnnnnnnnnnnnnnnnnnnnnnnnnnnnnnnnnnnnnnnnnnnnnnnnnnnnnnnnnnnnnnnnnnnnnnnnnnnnnnnnnnnnnnnnnnnnnnnnnnnnnnnnnnnnnnnnnnnnnnnnnnnnnnnnnnnnnnnnnnnnnnnnnnnnnnnnnnnnnnnnnnnnnnnnnnnnnnnnnnnnnnnnnnnnnnnnnnnnnnnnnnnnnnnnnnnnnnnnnnnnnnnnnnnnnnnnnnnnnnnnnnnnnnnnnnnnnnnnnnnnnnnnnnnnnnnnnnnnnnnnnnnnnnnnnnnnnnnnnnnnnnnnnnnnnnnnnnnnnnnnnnnnnnnnnnnnnnnnnnnnnnnnnnnnnnnnnnnnnnnnnnnnnnnnnnnnnnnnnnnnnnnnnnnnnnnnnnnnnnnnnnnnnnnnnnnnnnnnnnnnnnnnnnnnnnnnnnnnnnnnnnnnnnnnnnnnnnnnnnnnnnnnnnnnnnnnnnnnnnnnnnnnnnnnnnnnnnnnnnnnnnnnnnnnnnnnnnnnnnnnnnnnnnnnnnnnnnnnnnnnnnnnnnnnnnnnnnnnnnnnnnnnnnnnnnnnnnnnnnnnnnnnnnnnnnnnnnnnnnnnnnnnnnnnnnnnnnnnnnnnnnnnnnnnnnnnnnnnnnnnnnnnnnnnnnnnnnnnnnnnnnnnnnnnnnnnnnnnnnnnnnnnnnnnnnnnnnnnnnnnnnnnnnnnnnnnnnnnnnnnnnnnnnnnnnnnnnnnnnnnnnnnnnnnnnnnnnnnnnnnnnnnnnnnnnnnnnnnnnnnnnnnnnnnnnnnnnnnnnnnnnnnnnnnnnnnnnnnnnnnnnnnnnnnnnnnnnnnnnnnnnnnnnnnnnnnnnnnnnnnnnnnnnnnnnnnnnnnnnnnnnnnnnnnnnnnnnnnnnnnnnnnnnnnnnnnnnnnnnnnnnnnnnnnnnnnnnnnnnnnnnnnnnnnnnnnnnnnnnnnnnnnnnnnnnnnnnnnnnnnnnnnnnnnnnnnnnnnnnnnnnnnnnnnnnnnnnnnnnnnnnnnnnnnnnnnnnnnnnnnnnnnnnnnnnnnnnnnnnnnnnnnnnnnnnnnnnnnnnnnnnnnnnnnnnnnnnnnnnnnnnnnnnnnnnnnnnnnnnnnnnnnnnnnnnnnnnnnnnnnnnnnnnnnnnnnnnnnnnnnnnnnnnnnnnnnnnnnnnnnnnnnnnnnnnnnnnnnnnnnnnnnnnnnnnnnnnnnnnnnnnnnnnnnnnnnnnnnnnnnnnnnnnnnnnnnnnnnnnnnnnnnnnnnnnnnnnnnnnnnnnnnnnnnnnnnnnnnnnnnnnnnnnnnnnnnnnnnnnnnnnnnnnnnnnnnnnnnnnnnnnnnnnnnnnnnnnnnnnnnnnnnnnnnnnnnnnnnnnnnnnnnnnnnnnnnnnnnnnnnnnnnnnnnnnnnnnnnnnnnnnnnnnnnnnnnnnnnnnnnnnnnnnnnnnnnnnnnnnnnnnnnnnnnnnnnnnnnnnnnnnnnnnnnnnnnnnnnnnnnnnnnnnnnnnnnnnnnnnnnnnnnnnnnnnnnnnnnnnnnnnnnnnnnnnnnnnnnnnnnnnnnnnnnnnnnnnnnnnnnnnnnnnnnnnnnnnnnnnnnnnnnnnnnnnnnnnnnnnnnnnnnnnnnnnnnnnnnnnnnnnnnnnnnnnnnnnnnnnnnnnnnnnnnnnnnnnnnnnnnnnnnnnnnnnnnnnnnnnnnnnnnnnnnnnnnnnnnnnnnnnnnnnnnnnnnnnnnnnnnnnnnnnnnnnnnnnnnnnnnnnnnnnnnnnnnnnnnnnnnnnnnnnnnnnnnnnnnnnnnnnnnnnnnnnnnnnnnnnnnnnnnnnnnnnnnnnnnnnnnnnnnnnnnnnnnnnnnnnnnnnnnnnnnnnnnnnnnnnnnnnnnnnnnnnnnnnnnnnnnnnnnnnnnnnnnnnnnnnnnnnnnnnnnnnnnnnnnnnnnnnnnnnnnnnnnnnnnnnnnnnnnnnnnnnnnnnnnnnnnnnnnnnnnnnnnnnnnnnnnnnnnnnnnnnnnnnnnnnnnnnnnnnnnnnnnnnnnnnnnnnnnnnnnnnnnnnnnnnnnnnnnnnnnnnnnnnnnnnnnnnnnnnnnnnnnnnnnnnnnnnnnnnnnnnnnnnnnnnnnnnnnnnnnnnnnnnnnnnnnnnnnnnnnnnnnnnnnnnnnnnnnnnnnnnnnnnnnnnnnnnnnnnnnnnnnnnnnnnnnnnnnnnnnnnnnnnnnnnnnnnnnnnnnnnnnnnnnnnnnnnnnnnnnnnnnnnnnnnnnnnnnnnnnnnnnnnnnnnnnnnnnnnnnnnnnnnnnnnnnnnnnnnnnnnnnnnnnnnnnnnnnnnnnnnnnnnnnnnnnnnnnnnnnnnnnnnnnnnnnnnnnnnnnnnnnnnnnnnnnnnnnnnnnnnnnnnnnnnnnnnnnnnnnnnnnnnnnnnnnnnnnnnnnnnnnnnnnnnnnnnnnnnnnnnnnnnnnnnnnnnnnnnnnnnnnnnnnnnnnnnnnnnnnnnnnnnnnnnnnnnnnnnnnnnnnnnnnnnnnnnnnnnnnnnnnnnnnnnnnnnnnnnnnnnnnnnnnnnnnnnnnnnnnnnnnnnnnnnnnnnnnnnnnnnnnnnnnnnnnnnnnnnnnnnnnnnnnnnnnnnnnnnnnnnnnnnnnnnnnnnnnnnnnnnnnnnnnnnnnnnnnnnnnnnnnnnnnnnnnnnnnnnnnnnnnnnnnnnnnnnnnnnnnnnnnnnnnnnnnnnnnnnnnnnnnnnnnnnnnnnnnnnnnnnnnnnnnnnnnnnnnnnnnnnnnnnnnnnnnnnnnnnnnnnnnnnnnnnnnnnnnnnnnnnnnnnnnnnnnnnnnnnnnnnnnnnnnnnnnnnnnnnnnnnnnnnnnnnnnnnnnnnnnnnnnnnnnnnnnnnnnnnnnntgtctgcaagcataacagagtatcattaatagtgttaggagttggctcttctcctatgcgatggaagttgagctagccattagctggtcgttccctcaatctctgcaccatctttatccctgcatatgttatagtttgaaggttttgtgggtgtgttggtgttcctctccctccactgtaagtcctaccttgttacaggagatggccacttcaagccccatatcttctgctaggagtctcagctagggtcccctccaaatcttcccaagaacttctcccatcccagttctttggcttgttccagagatgtcccctctactgatttcccttctctctcccagatctctcatcccccaactccactccccctccacatctgatccttaccctagtgcctctccccatcacactccttccccacacccagttccctgttctttctctccatccacttctgatgtctattttatttccccttctgagttagagtcaagcattctcccttgagccctccttgttatttcactttttagggactgtggattgtagcatggttttcctgtaatttatgactaatatacacttataagtgagtacatatcttgtttgcctttctggatctgggttacctcactaaggatgatattttatagtttcatccatttgcctagaaatttcatgatgtttctgtttttactagctaagtagtattccattgtgtaagtaccacattatatttatccattcttcaggtgagggacatctaggttgtttctagtttctggctattatgaataaagctgttataagcatagctgagcatgtgtctttgtggggatgttggagcatcttttgggaatatgtccaggagttatatagctgaatccttaggtataactatttccaattttctgagaaacagctaaactgtttcccaaagtggttgcacaagtttgcactcctgctagcaatgaaggagtgttccccttgctccacaacctcatcagcatgtgctgtcacttgagtttttgatctttaagatcattctgacaggtgtaagatgattctgacaggtgtaggatggcatcttagagttgttttgattttcatctccctgatgactaaggatattaaacatttctttaagtgcttcttggacattagagattactctgttgaaaattctgtgtagctctgtaccattttttaattgggttatttggtttgttggtatctaatttcttgagttctttatatattttggatattagccttctgtcagatgtaacctttgtgaagatcttttcccactctgtaggctgctgttttgtcctattgatgttgtccttagctgtgaaaaagcttttcagtttcatgatgtcccatttattaattgttgatcttggtgcctgaattgttggtgttctgttcaggaagttttctcttgtaccaatgcaatcagggctgtttcccactttctcttcttttagatttaatgtgtctggtttttgttaaggtctttgatctacttgggcttgagttttgtaaagggtggtaaattttgtgttttatctatgtggaagaagaaagtaatgttggtcatgtttatatgaggtagcttctatgatctctcagaacctttcttgtgctattggatgtaaaggcttctgggttgggctggggttaaacagacggtaaaatcaagaggatcgtgctcctagactatatgtctgtatgtccatctgctactctgtcctcacatcttaggatatgctcaggaaaatgccacctgatggaaagagacctgtgttgctgtgttggtgaattaatagaccacacgattccatcattactttcatttgtgtgcttattggattgagatctgtcttctcacacttgatcttagccaatgaggcaatgaggtctgtcttctctaccagactagctaatcttccaaaatattagccagatcatttgttccagtaggaataagacctgtcaaggatggaggattccatagatgctcattacattgcatttctgtcctctgatcatttagagtttttcacattaaagatttcaggttataagtccccaatttcattcccagatcccttgacttttgaaggacggtaagaatattcatctcagtgttgaaacagagatagcttttcttctaagagtggtacagcaaacagtttacaatggaagcttctcatataattgcaggaaaagcagcttttctataccaccgtgataaagaaaagtccttttccttgtttgagtacaatttagtgatattggcttctgagttttggaaagacatcagcatgcacctgtttggttgtagttacatcatccctcgtcaggtaaagctattcaatgctactgtcacttgaaatgccttttctgagagtttctgacacagggcagataccattcctcctgcttggctcttataaagtaatcagaggcatattttgtcttaagattcttaaggaactgaaaatacaaaagcttacatttagaaaagtgtcattaatcctgacccctggaagacagtaccagccacggtacctttgaaggcaaggcctgctactgctttaaaaaaaaaatgtttgcaatgtgggtggaaaagggcttgtggagcatatggtgttctgtccttcctttcaaaagccctgtggatttgacaagactgtgggcgggatcccatggtcctctgcttcatagcctggcatggctgtaagggcttctctgcttccttaggttttctgactatcctttttctccatcttttcccttcctgcttcctggctggatccaccataggaacgctttggggtaactatgatttttttactttgctttattttttttcttttagtagaaggtttaggggactaggtgggaggagggggaaactgaaaagaaattggaaaagacagagctaactcaatgagaaaggaatgttgggtttatatgaatggcatgtttccattgagagccaaaagcttaaaagtgagcagtttccaagccttcttgggaagtgaccattcctgttggtttgggtaggaattgacctatatgtttctcttacatgttttaggtagatgtgcttaaaaggcaaaataatttattaaacatgccagagcttttagatgtgaaagtccatattaaaaaaaaatacagatatttgggttacctttcaaaatggcatgcacatcatctcatcacctttgacaaacaagggaacttagaattctattggtataaagtcaacatgaagggttaattcgttgatttcatgccttttgtcaaaaggaaactatgacttccctatctgagtctgggcatagcagagccagttgcatgctaaatcaggtgatctccatctgatgttcttgggtcccctctccagtgagtgttaacatcatagtctgggtcaccgtgaggaaagaagcaagcctggtctcactatttagagtcttatttcccagtatgtacgtggttttacaaattgtagctatttcagttgaatacaaagatctcaggggatacgcagggagggaagaaagagatcttcattaagagaaaacactttttgagatgctgcataacaagtatcattacccataagatcaggagaaaggtgagtgtggcctacaacttggggccgctccaactgagtagttctctgaagcccatggctaggtacagagtttctgagatggaaatgaatgcaggaaaggccagccacccgtaattggagtgtgggccacggttctggcaagacacctatgcacatgctttttctgaggtggcagcctagccagcgagagtggtgtgttccccaccagtctttactctgttctccccacaccggtgagctgggagaagtaacaaacctagacttctggatcaagttccccaataagacatgctctcaactgttccctttccagccaacaaatatcttaaaaacctgctatgggaaaggactgaactaggctcagtggagatccacagtgggcctctggtcatggaatctacttgatgttatttcttttttatttagcagtttggtattacagtgcattaaactgaccactagagacatgaagcaattattaatatatgtgcatggaagttggtgtgtccctgtgtgttcctctacgtgaacacacagacatccccttttttatatgctcatatccaagtaaatacaatagaaattgaaaatgctttaaatagaaaatgcacttattacagttatgggcatcttatcaacttaacagcatattattaatactgcaaagtattaatctttaccctcatgattttgtgggtgactagcaccactgactgcctggccttgcaagagagtttctctctgtatactattagtctgtggggggaatatcccaacttgacatcatttctattgaatataatttactgttgcacagtctgaagttgtgaaaccataagttgaacagttgtgagcacatggatgcgcatatatgggcatatgcatattgatgtgtgcacatgtacaactagagagtgatttaagactcctgaagcatctttggactgccccagaataagctctacactggcccggtttctggcctcttgtctactctcatctctgcatttattctgttgttattaatgcaatagtgtggcttccacttctgtttatcccctttccaaatgactccctggggtcctctctctgcagaaccaacaaggggagggatatcaagactatcaagtctctgagggtacttcgagttctgcggccactgaaaaccatcaagcgcttgcccaagctgaaggtaatgttttcagagttttttcccatccaatacccttctttcatcttctcccgttagctacagctggctagcctttgcataatctattcttagaatatcccctttttttctcttggggattgattttttttttcatctattggagccaaggtctttgtttcaaaggaaagtaactaacatcccaagtaactcacaggtgagattctccttcttcagtccagacccagttagttttatcctcccttgagtggcctgtcatccaggaagaagactatatggctttgtcatggattgtcctgtgtcattaaagaagaagtcacagaagccctctgtattaatggtctgtgtgctagggtaggccggataatctggagtatttttcttcagtcatagttttagaaaagtttacacaaatgtttcatattttttagatacaaacaggtaacctaaggacacatagtctatttatggcagaaacagaaaagaaatggagaagtgagttaccctggataaacttcttattgccatgtcctggacaaaaataggtatcttttccatagggcttgctctccattcaagcttggcatcctacctaactcagcctcctctcttttcctccccatgtatcatggttaataaaatctgaagctccatgggagaaaagatcctccccttcttgaattcttgagaactctcagcttccagtacagagccttacaatctgattcaagtagtccaggccacccagccagtagagcaagccccagccccagctcccagtccccagccccatcctcccggggtacacaagggtgcttcttaggaatcagatttcattatccatttgcagaatccatgaggctagcataggacttctcaaagagtggccatagaccacccttgtctgaacactgaaaatcttcctaaaattcacctatctgtccatatcagcaccactgagccagactgtgagaggggcctgaactctggctcttcaacctgatgagtatatactccatagtgtagggactggccatgaagaagaacctgcatgagtactaggtccagctcaaggattttggagtgactcagaggagaatacctattcttagaatttcttgcacccagaaaatggagatctgtatactctacatttatagtatagacaagagagctgccatgagccaaaaacccagcagttactctgggagatggactactctcctctgcgtgnnnnnnnnnnnnnnnnnnnnnnnnnnnnnnnnnnnnnnnnnnnnnnnnnnnnnnnnnnnnnnnnnnnnnnnnnnnnnnnnnnnnnnnnnnnnnnnnnnnnnnnnnnnnnnnnnnnnnnnnnnnnnnnnnnnnnnnnnnnnnnnnnnnnnnnnnnnnnnnnnnnnnnnnnnnnnnnnnnnnnnnnnnnnnnnnnnnnnnnnnnnnnnnnnnnnnnnnnnnnnnnnnnnnnnnnnnnnnnnnnnnnnnnnnnnnnnnnnnnnnnnnnnnnnnnnnnnnnnnnnnnnnnnnnnnnnnnnnnnnnnnnnnnnnnnnnnnnnnnnnnnnnnnnnnnnnnnnnnnnnnnnnnnnnnnnnnnnnnnnnnnnnnnnnnnnnnnnnnnnnnnnnnnnnnnnnnnnnnnnnnnnnnnnnnnnnnnnnnnnnnnnnnnnnnnnnnnnnnnnnnnnnnnnnnnnnnnnnnnnnnnnnnnnnnnnnnnnnnnnnnnnnnnnnnnnnnnnnnnnnnnnnnnnnnnnnnnnnnnnnnnnnnnnnnnnnnnnnnnnnnnnnnnnnnnnnnnnnnnnnnnnnnnnnnnnnnnnnnnnnnnnnnnnnnnnnnnnnnnnnnnnnnnnnnnnnnnnnnnnnnnnnnnnnnnnnnnnnnnnnnnnnnnnnnnnnnnnnnnnnnnnnnnnnnnnnnnnnnnnnnnnnnnnnnnnnnnnnnnnnnnnnnnnnnnnnnnnnnnnnnnnnnnggaagggaagggaagggaagggaagggagagggaagtggaaggagggaagggtaggaaaagggggaattgaagggaaagggatggtggaaaggagagaggagggaaggggaagggaggggagaagggaagaaggaaggaacaggtcacttctaaaggggtccagactagctgtgacatgggtttgttttatatcatgcatgtagattcccaggggtaacttggtctttaaaggtagtggctttttcccttgctttcctccatcccctcctggatcacgacattctatggtgtcatatctccctgaccaccctcccactagcaagccactggcttaggcttatcaatcaccactcccatgtgtcccatctggggctccaaatgtgaacttcagtgcaagttcccatgggaacagaggaatgtgcaacagcttgacaggagcagtccacccccgaagaatgtggccgtggccttcattatttcttttaaactggggatcactggctcctctctttgttaatgaacaaacaaagccagacatgaaatgacataaatggctctgatcattccacaagtctgttgtgttgctcaccttctctgcagtgttaaactaattgatccagacatactatacccagtgctgtgaagcagcaaccacacaattgcagtatcattgtaaggccagactctccggtgagctaaactcccaaagcccagaaaataagctaaaaatggccttaaatgtatcaaactctcatggaattcctcgtggcattggaaatagaagggaagtctctggagagtctctgtttttacatgcaaactgaaacccttgtttctatccacccagcctcatccacaacacagagagacctcagtctgttctagagtcaatgttgaccttccccctgaaggcaatgagtgtgcaactagagggcagcagcgtgaaatgatagagcctgatgtagtcagagctaatatatgaacttatgataaaatactgaggtgaccaaaggtagtagcatgcgatagccctttgattcatttagaaagggaaaagaggatggtacataatcagtatgtaaataaatctgtcaccaataggttcaaggtaaagaaaaagctgtataatgggtaaagtggtctaaatgatcttctaagtccccactagcatttcatttctgggtagtgcctccacaaagaaacccctccattactttatgccatcttgtttaagcttcgtgctttatatttactttaagatctagagaaggtgtcttcttccagggcaggtccttgccaccatgaccagcttgagagtgagctcttaaccctgtgagtatctctgctcagaggggagagagcccctgggacagcttctcaatctgcagggtggtggtatggccctacctcagctcacaggaatgacacgagagcctttgctgccgtccacaggctgtgtttgactgcgtggtgacctccttgaagaatgtcttcaacatactcattgtctacaagctcttcatgttcatctttgccgtcatcgctgttcagctattcaaaggaaagttcttttattgcactgacagttccaaggacacagagaaggagtgcatgtaagagctactaccatatacctctcactactaacaaacccctgggtttcctttctctcttaactcctttcccattgaattatgaaacaggaagaattataaaatgaatagatatttgttgaactcctttattgtatcagatttggtaagagacacgttgccttaacccttaagttttaagtctttctgatgatctactgaaaggagttttatttacattttataagtatagacgatgacactcaaaatttaggttgtccaatataacaaagggttagcctaagaaaaggttagcactctgtatcagaatccgtcctacatctgctgggccccaagggccaattttattccatgttagtatttaataagacatgcccttccttttctgtgatggtcattgttaccccgacattcttaaagtgtataagaatggttgactgttccacacacttgccttaaaagcactatttcatttctattttggtttcagaggcaactatgtagaccacgagaaaaacaagatggaggtgaagggccgggaatggaagcgtcatgaattccactatgacaacatcatctgggccctgcttaccctcttcacagtctctacaggggaaggatggcctcagtgagtgatggggtgggcttggtatgtgtcttgcaggctgagatgggactgtgtgggtgccttgaaaagctgattcaagatgaacacggctaaccctttgttcttctaccaggctaagtaagtggttatgagcgggggagaaaggcagaaaggaaaaataaaaacccttcaaacaaagatggagaggaggaagacaaagtcaggaaaacatctaaaactctaaaaacccttcagataaagatggagccaaagtcaggataatatctgaaactctttttttgttttttgttttttgtttttttggtttgtttgttaatctttgagttaggtggagccctctgacttacagaacaaatgagtttttacaactttctgtccctcaggagaatccatgagggctgttttaaatggatttattcttaaggttggccctatacttgagagttaaaaggtggaggggtctggcagaccacagggatgctgtctaacactagacccctttagaaagatgcaggtttttacgctgtccacagcaggatgatgatttctttaaaagacttaggaacaagtaagacattattagttagtgggagaaatccaagtggcactagaagtctgttggtattgaacttgacaacctaactaaaagaggatagcaatctgttgcttaggagctgaatgaagatggaatataggctcgaaatggcagtagtattttttctttatgaactttgttatggtaaccccagatcagtggaggattggaaaaagtcagagaagtcatattaagagctatgaaaggtgacccatctcctaacaaagccatggatgtcatgtatcatctgtaccctctcttttggtcctcacagggttctgcagcactctgtagatgtgacagaggaggacagaggcccaagtcgcagcaaccgcatggagatgtccatcttttatgtggtctactttgtggtcttccctttcttctttgtcaatatcttcgtggctctcattatcatcaccttccaggagcaaggggacaagatgatggaggagtgtagcctggagaagaatgaggtaacaatagatagactatagtaagggacagcaggggaagcatcagaaaagaataaggaccagcatgcttagagggagagactgcattttctaactttatgatagcattaaagctatgcagtcttggatgtgggactccgtgggtaggaacactttttctagtataaggacccaagtttgaatcctcagcatccacataaaaagctgggctggtgagatagctctgtggttaaaagtacctgttaccaagccttatgatatgagttctgtctccggggccctcttcataggagagcaccaactcccacaagttgtcctctaatctttgcatgtgaattttatatatcgggcacacacacaacttttattttgttcaaaagctgggcacagctgcatgtgcctatagtcccagcagggaaacacaaacaggtaaatcctgagaacttcctggccaatcagtgaacgatgagcttctggctcagtgaaagatcccagtccagggcaataatgcaacagaagaagatgccatgaccttctctgaccaacatgtgtgtgcacagacacgtacacctatacactcacatgcatatatatcacatacagacaaggcataaaaatatacacaaaaataaacttgaaatttctacccttatatgtgatggcctagaaggaaaaaaaaagtaggtgctacagttgcagcattaagacatttgcttatgtcccttgctctcatggcatctgtgtttctaataacagggaatatgttttattgtgtgctcctccagcacatgcataggtttggaacattattagtttcatggctaggtttgttttttaacaaaggagctgaattagaaatggtcatagattataagagaaatacactggcagatacaggttgaacacctctaatataaaaatccaaatgcttacaagtccaaaacatttttgaatgatacgatatggcaagtagaaaattccataccatgaaactttgtttcatgtacaagattaataaaatattatataaattacccttaggctatgtgggtgagacacatatgaaatattaatgaattttgttctaagctgagcatcctgccttcaaactatctcattacatttgtgtaaatattaacaactcgggaaacaagtctgatatcacaaatcactctggccccacatagttcagatatggaattcttatgcagtagattgatagctataactatgggcactagaggaaagtttccccataaaatctcagccttatatggtataagatgactttcaacccatgtgacaggatgccttccagatgcccccagatgtgtaaggtgacatcttgcctatggtttggttcagatggtccctattgctgctttatgattgtgtagcactttcttttatccttaaagggtctacttaatagcgcccatcttaatagcgcccatgcaaggtttaggggcagttgagctaattctaataaccttgactttctgcagcgggcatgcatcgacttcgccattagtgccaaacctctcacccgctacatgccacagaacaggcacaccttccagtaccgtgtgtggcactttgtagtctccccatcctttgagtataccatcatggccatgattgccttgaacactgtcgtgctgatgatgaaggtaagaagtaattctgtttgtgcagtgcctgggaaatcactccaccttactagcttaccacgtttacctgatcttgcatcctggagtctctttgatcttacctacttcaatagcctagcccctgaatttctgagtaggggtagggttatggaataaaatgcagagtaacagagtagcagtaggggctctcaggaacaaaagacgtcaataaggtccacctttgacattgtggagtctaaaggagtactgaagttaatgtgagcctgatcatatttaatgctaagtgcaaaacacctaattctggaaagcgcttctgttgtgctaccttcagtttgggtatgaaggttatttttgctattaaggtatcccaggtgggacatgggtatgtgttttactacataatatgcatgtattgaaatgttctaccaggtcaagatgagagctagacctggcatgtatattccaccacatacacatatgccttaaagatttgtctctattattcttttcttccccctcctggcagtactactctgctccttgcacctatgagctcgccttaaagtacctgaacatcgccttcactatggtgttttccctggagtgtgtcctaaaggtcattgctttcggcttcctggtatgtctgtcccagcatcagcttctcttcctttggggtacatgcaggttactgctgctcaagaatggttcaccctcttgcccatctaatagggagtttaaagaggctgccatgtgagtaaagtaggagaagaggcaaaggaagccacctgcttatcgccatactgatctaacagtctatgccagtcctactgaattctgtcagccatggggcagccatcaatggattttactagaactacaattgacacatgaagaaataagataaaaattagattagcaggctggaggcatggctcagcggttaagagaactggctgctttctctaccagaggtcctgagttcaaatcccagcaaccacatggtggctcacaaccatctgtaatgggatctgatgctctcttctggtgtgtctgaagacagctaaagtgtgctcatataaataaaataaatctttaaaaaattagctaaatcttgagttatttactggtaatgtatatacttattgtatgatttgaatggaaaaatatctttcatagtctcaagccagcaaataatagattttagttattagtcttctgaccataaagtatcacaaagggtaccttctgccaatgaaaataaatgtttattacttatgttcacaatgtccaagtacttttgagggtttgggggtaggtgggtgaagattctggaattgactttgagagagagattgtaatggaaattattctggcatgagctctttttttatttctcctcaactagtaattataattgtttgacaaactcttgcatctgttcccaagactgttaacaacaaaacctgccctttgcatcagtgcactataaacaaaatccgcccctccctctcctcctgcttacttcagggtgtgccttgtgtgttcaatggggtgcagataagcccacttgacaactgtttcacagttattcagggtgtgcattatccttcccagggtatacggtccaggtcgctttcctagcacacaggggaaagtctgctataaatcaaaatgagtgcttcaggtagcagctgtaacagagcctctgagctgggcttgataattgtcagtgttggttgtggaggctgtttccagtctcccagttctttatccaaccattaatttgattatttggggtggagagttgaaaggaacccattgcaggggctgcattgtggaattcctgactcccttttgagtgttttgagattcgaggaaataaaaaggtaaaaggaaactttatcaaacaaagatgcctttataaaatagtctagcccaaatagggtgaagtgaaaggaggagggggaaccagcaccaacatggggaaagcttctctatgagtcttggtgttgacatcgtctgtgacttaaaccccaattacgtgtaattatggtgaatgctgaatacatacttacaggcttaactagaggactcggccttgagccctgcctccttcccaccctcatccctgtgtttcattcaaggcctggagtcattcacaccagaataggcaccgttacattggtttgacatctgaagctttcagaatgccccaacatgtactgcttggtcagatcttctcattaactcagaaacaggcagagtagatattgttgccattgctacaattatccttcaaaaaaaaaacaaaatcaaaaacaaaaacaaaaagaggaaggtcataagatatgtaaaagttatataataaaatgtagaattagaaagtgggtgtaaataaaatggaacaaaaagaggaaattgggctaccatacagtgctttctacatcctttttttttccctctgtgtaacaagtgcataaaataggcttacttgtgttcttcttttataggtgaactatagctcagggaagattaagactttgttcagagttagtgaaagacaaaccaggagtttgatcttggtctatctgacctcagagttcacaataatctattagtttattaagcaactagggcatattccaaaatttccaatggatacctcaaactgaggataatctagtatctacatattctttcatatatggctaaatgttgcgatgggttctgagagtctcacttatcttcatttcttttcctgttgatgcgataaattatactctgacacatgcaacttaaatgataagtggtttattctgtttcaacagtatagtctagtgttcagaaagtccaagtgtcaggtgcttgaagccatgggtcgcatgacattcacaatcaggaaacagagaatgatgcatacatacgtctggtcaggttactttctttatatagtaacatgatcccagccagggtgggtcttcccactctataacacaaccaggataatccctcataagcatgctcagaagcccatctcccagatgattctagagtctatcaagttaacactaacattgttaatctgttaattatgtcaaattagcacgaatattgtttggtgatcttgtcgctttgtaaatatcatagtatgtatttacaaactgtaatagctctatcaccagacagcatattatgagacccactgcgtatatagtgtgtcattggcagcaacattattatgaggtctttgactgaaatgtgttttgtcctatcaagttgagagttttcacttaaagcacttcagatcttcactttggtgttctataatttttcacttaatattttggattgtaagtaactaagatcatagaaaatgaaactacagataaaatagaagattactgtagtgcacaatatgggatgtgctattgtaaggcatcctcaattggaattcaaggtttctaatcctctgaaatgaggaaattcatctctggatggagaataggagagccttagagtttggggaccttcagggccccacttggctcccttattagtgagttaagagctccactagaaggtgaacttgttcacaaagttgagtacatctgtacacacacacacacacacacacatacacacaaatatatgtggctctgaaatgagatctccctaaactttagttttcccacacagaaaacaaggataataatagctgtcttacagtcttcaatagatgatgctcattaaacaaagcctccctctgtaccagcctttctctgtagcatagcttcgctgttttagccaagccttctattcagtactctataaacttgggacatttggcattacctaaccttcagatccacaagaaggacaaatgagcaaaagaatatcaaggatctggaaaagaagataaagatcatatgatgataaatgtaagagtaggtcagaggacgctttggtgtcatccccaaaactgatggtacctggtaccaaggggaaagtcaagtggacattttggaggagtgggtttcctgtttaaagaatgtagtccaaggtatgtgctatctgagattggatggacacatcatacattctgaagcaagaggagttatctggttggtggactctctgggtcttttatatctctcctatatcctattcaatcaatctcctcatttatatataacacttaagtactcttatggtataacagagcagaaaaggggtcggggagttggagtctattcatcctactgtcaatcatctgttctgaaaagacagctttgctgctgtctgtaacctttagtcccattgaagccagtcctcttgaagcaataaaaataactaagaagttaaagctgtatgatgcttaatgtttaatggccatatacttatcccaattcctcaaagtatatacattacaaatgtaaagctttttctttgttgatcaaactcggtagcatgggtaaaaacaaatgtttcctaattaaaaaaaaaaaaaaagaaagaaaaaacctttcttatgggatttttagtgacagtttcaaaaacatggtctacaaatagttgtggaactgttttaaaaatgaggagttcccaaattagtaaaggagaaacagaatttcgggttagaaacaggaaactgagcccaaagttagaatgaacttatgcatgaattgacaagttttaattccaagtgacaaagttatgtaatgaaagatgtttttctttctttctttccttataatgttcatgttattgaatgcacatggcagaactatttccgagatacctggaacatctttgacttcatcacggtgatcggcagtatcacagaaattatcctgacagatagcaaggtgaatgattcacaagatcgccatagttaagctgtatcctgatgtagtatttaaaaaacaacttctccacatacatctaatcaaacaggtccccttcgtgttggaagtctacttcatccatcctgagcaataatcagagaaaataaacttggggatggtgatagtcctcatagaagcattaggtatatttgcatgactcaaatagaagatatctaatggcatagtgcaaaagaggtgttggaagaaagctaatattgggtgtttggctgaattctccaaagagaaacatagtctttaacctccaagttgttagtccgaaagtgtttccctaaactagttcatcctaaagatcacgtggagagctttattgtaattattgaataccagaacgccattgtgttgaggggcttaggagagtgctctttaggaatctaagtgcagaatttagagtatttggagaaactggggaagccagttttcctcccctgtgtgctggcgtactcctcaaacccatctatctacctaggactcaaggagctcagctgggaggcttagagggagactcactgggtgcccctcaacaggagttaggttaactgcaaaagacagagactgccatctattttgtgatctgaataaggaataaatgcgaaaataccagtgcttagatctttttaaatgagcatattgtcactaattacatgtttccttttggtccaccagctggtgaacaccagtggcttcaatatgagctttctgaagctcttccgagctgcacggctcataaagcttctgagacagggctacaccatccgcatcttactgtggaccttcgtgcagtcctttaaggtaagaggctccccgagggtggagcaccgcatgccagacaacactgcagcggcaccctcaccctggttccttcacttccaggaaggagtttgtaaacttgaagttcattagaagcataaatacaatagttcttgattatagcgcaggctggctggatagtgatcaattcatatctacattacagaatcttattctaaaaaaataatgtatcgctttcactttgtaatctttttttttctcagcactgagacagagatgtgctttatgaattatgtgctgtccttgagtattctaaatctccttgagcaatcctgcccatacatagagtcagcctcccgtcgtcagatgccttcagtgtgttcaggaacttgtcagtgacttaacctcatggaaaagtttttcagaggacttttcaactcatacgtcataaaaaagatgactcatgtacagttcaccatgtcttcagcctgggcatctcttgaactactgaatgaatagtatactaatggcacacacacacacacacacacacacacacacacacacacacaaagtcttataaaagctaggaatgtttgatcaagttattgcaagatagtttcttttaaacattcatatgggactgtgcctatgtccaggcatataaaggtttgttaaaacatagacgcctgaaacccacttcaatgacaatattagtaaagtttccaaacatactttctttgagctctaacaatagcataagttaaatgtctttttgacatttaacaaataacataattagatcactgaggcctgggtgcatttcttttcttgcagacaaagtttttcaattaatatattaaaaataaatttgataaaattgattcaaagatgacaaaccataagttcaacaaattgtcctcccccatttatttatacatttaattaaatttaagagaacaggacagtaaaatcatagcatgtaatcacctgaaaagggagattccttattatattattatatattccaacatatttcctattgatttgtttcagcatcagaatctttgcagtttgagatgaatccgtgactatcatgtccagattccaagatatggcctttgcttttccaccctacccctagcaagaaccaattttttggcagggttattcccacagaggccttaccccaatgaactccagtgttccagggttagaggacagaggaaaagtttaaaaccttacaagtttgccctctgattcttgggtgagttcagatttagaattagagagatggactgcttttaaagctgttttttttttaattttattttaaaagagctgcccatcaggcatcagttgttagtgagtctaagaaataagtgtcatactgtcatgttatcccatcagtgagactctgtgacactgtgtcctattgaagctaaagaaaatgatttcaaaaactgacaaccaaatgggtagcatatttagtggatgttacaagaacgtagtaggcaagtgcatctggatcccagtggggtggtagtctggatgggtgttttatcttcaggacagttctgtgatgctgtacagaagcagattgcctaacaacaaaaaatttaaaggtaaattcacttacgcaaatccaaagcagagagatgttcaatattaatactatatcattgcctttacctactctgacctaatcctaggattcatccagagctgtctcaaccccatgttcagaatgccaaaactcttttctattattttacattagaatgcattttgagaccagaaagaacaggagctaggagaacagatggaatctttggtgttctcccaaggtttggaataggaagatgatcttggactggagactttgggtggcaaagaaagaacaaggccaagccaaatgggtagactaggtcatagagcatcagttcaggcagcagggaacctgcctcctttgccaatccttgtggaaattcagcaaatcctttccttataccctgggactcagtgctttaaggaggaggaggaggagcctcctcattggttttcaggtgcattttaatttgtcctctattgaaatggaaacttaagggttctttggaaggtcagttgttttggagagtgttttgctgggggcaaacacgtgaagaagtgttttcctgaagtgacactggaaaaggatgttttgctaaaacaagcatgtgaaaggatgtgtgatgaaggatccttctattagtggtatgcatgtattggtctgtcttacactgcattgttcagctccatttgtcatgactccatagtaagaaatgcaccaaaaaaactttggtggtgtgctggtggcttcttgttgcttctacagacttagggcagttggcagagtaatgtcagctgatacagactgacacagagatttgctaagacagactcatatgctgagacaagacacgtggtgaggacctgtgaaggacacatgatatttggagggagtataaataggaaccaaaaaagaatgacaaagcatagctctgcaatgcttgttagtctcacatcttcactgatcttcacacacacacacacacacacacacacacacacacacagaggacaaaaaaactctcttggggtccctgttggtcctaattcttcctgctgactcatgcttatttggctgaggcctagctgtctctgctaggtcacagcaccactgctgactcatgtttactatcctggcaataccaaactagactgcggggatatttgtgaagtgtttgctagtggatggagctgccaactgctaaatcctggaaactaaactgctaatttcctggcaatgcaggtgggatttgctccaaaaaacaatttctaaacaggtccacttccccccatatcctaatatcctttctttcccactgcctctggtgagtggtaggctagaagggaggttaaaccatttaaaatccgtcattaaaagtaagttcagaaaaaatttaagcctatactctattcaagttataaatagtccctcttgaggctcttcattttcctaactttgttgataagctctgccctgctccagccatctgaaagcctttgactggtctcctgggactcatggtcatgagtcatgacaagattgagactcacaatggcactggctgcctgggagcttactgaatggtgaagaagagagaacttcatgtcagtacaaggatcactacacaaccatattggtccatcctgctccaaacctcaactgtcttgtatctacccctgccccagaatgtcaagagcaagtccttgccttctattttcataaataaaaatgttatcatcacaaagtggcagtaagcgtacaaaatatagatttttaaatttttgtctcatggattcattacagtttcataatggctgacacttagcaggcattgggggaatttatgtgaaatacaataaaatattgaaaggattaagcactggaaaatggtgtttcatcagaagataaaagatacttctaggaatggataacaaggagcctctagtcatttagctttgcctccagatcccccactatgagttatacattagatgtggggatgagagggagcaatgcagagaccttgaagccaaaacttattcttcttctttaatttgggtcacagttgctaagattattaatcttctacatgtcaagtgaaatgtctctcaaactcagaaagttttgctagccctctttggagataggggtcacatatccatcagaagacttgggagtattttaaaaaaggaaagactactccaaacagaacagctctaaggatcagtgtcagtcctgcttcaaatagcctcagggcaagagcttctatcttgtcaatgtctgcaggagcagtggtctccttgattaattattatctcttgcttcccttgcaggctcttccctacgtctgccttctcattgccatgcttttcttcatctacgccatcattgggatgcaggtgagtggtctgatggggcagcagctgcccacattgtctctggcagagttgaggatttatgtgtgtacagtgtcacttgactaagaaacttctccaccatcttgttgcattatgatcttgggactttcacatgggccaagtggctccctaggtattcagggtggtctgctctgggggattcatctgaggtcttccaattatgctgatgacttagaagtagctaggcttctatgatagaactaaagcaaaatgacatcactgttttcagagagagagggactcgcattgcaactaaagtaaggattgtttctgacgatctctgttatttggacttgaccaaaaagaaggttagatagctgttccccctataagcgatgataccaaatgcatctatattaagttttaactgtctaagttctctaagacttgttactgcccatcctagggagccccagagccatattccaaccaattcctattgtacagggtcgtggaacttgctggataattccctggcctactcatatcctcaaaatttttagaacttgatatcagatcaagttctgtcctagatatttgtgtggctagctagaggttcactgcacctcaagaagaaatgttctttgtaagaacaagaatcaccgggggtagatggcctgcttccataaacaatgagcatgcatcccctaatctatttgatggggtccacgggccttttgattgtctaaagaaggcatcctttctggcttaaggagctgcataactaaaccccctaagaactttatctaacagtccccctgagtcaggaagtctgggtgcctcctcaatggtattggccacctggccaccaggccacctggagccactgcctcagtttccaagccttctgatcaactgtcttgcctagattctttccaaaagacctcttattcaccgttttcctctaactctatggcctgaaggtattctccaaaaccacagctaaatgtccagcatcagaatacataaggcctatggaaaggctgtggttttccttctctgaagatcttacaatccatatgtaaaatggtgtcagtagcattagaaacaattgccacagaacttaacactctcttaataactttaagaacctattaactccctccaaactttaccttagaatttacatagtatcaaaccaaaaattgaaaactggttaaattaaatttagtatgtctaagtttctgtatgataaaatagcttaactctttcatctttaagcaaaataaggtggaatgagactatcttcaagcctactgataagactcatattgatgctaataatgctgtctactccagttacttggtatgccaggtatggtgcttattgtatgcctatatgcaaacatacacatacatacagacatacaaagagaagaggcaaggcatattagtataatcaggagtaattgagcttcattgtttccactgacatttaacatggttaagtagcctttaaccttattcatattctcacataacaagttaaaaagctgatattgaaacctagctgtgcctctttacagcccagttcttagcactgcaccttctttcatcccataagaggagcaaatgcaaggacgtttttgacttgtcagtaggagatggagactgcttttccacaaagacacaaatgctttggccactgtggctttcgctggctattcccagcctagtctgtcacagagagccagaaacatgtacaaattatgcacactccagagtgtgtcactaaaaacaccatatccaatgcagtcatcacaaaacagaaaacttatgatggtttgaatgaaaatgggcccataggtccatagagagtgatactattagaaggtgttgtcttgttggatgaagtgtgttactgtagagatggtctataggcattgaggtgtcaaaagttcaaggcagttcccttcctgctgactgcaatccagatgtagaactctcagctccttctctagtaccacatctgcctcgatatggagtccataatggactaaacctctgaactgtaagttagcccaagttaaatattttcctttataagagttgccaaagttgtgatgtctcctcacagcaacagaaacccaaattaggaaaaaaagttggaatggggtattgctgtgataggcctgaccatgcttttatttggagaaatgtggcctttgtatttgaaaagcatttgaatgctttaagtggggcttaaagggccatcctagtagaacgtggaagaccgtggtattgaggatgatttgaaccatgggaacctgagttaatgggtttcaaaagagaaaaatgttagtatctggccaagagactttttgtgtgtgtgtgatattttggcaaagaatgtgactgctttgtgctctagtccaaaaaagtttgcctggtactaaaatgaagagtttttggattaatttcattggcagaggaaatctcaaaacagcctactattgactctgtcctatggttcttagtattcactcttgtggagatccatagtgaaaagggggatgctgaacaaggaaaaatataaaatgtacaatttgaggagaaaaggggcaccaggaagtggaagggagctaagccctgtgttcaaggagataaagaaaaatagattattaaatagagtacagagagtggtgacctcagggcaatacccacctccaacccctgccagctaaacttcaaaattataagaaggaattaaagaaaagtgaaaaggaattaaagaacagcttaggtccaggtgtggtagcctaggcctttaatcccggcactctggagacagaggcaagtggatctctaagctcaagcccagcctggtctacagagtgagttccaggacagccaaggttaggctacaaaggcaatcatcagaaacagagggctgaagatgtaagagccccacacaaatagaaggtacaatggataggaggagtaagcttttatgtatataaaaggcagccagatggatctataagacaaactgttatactgcacctttaaagtcctttcagaagacaacatctttgcagaacaaataaacaacttgtcccttacaggaaggggtttatatgcactcattgttagaagagatgccattggccttagctcttgtagctctccagcctgtgaactaggttaagctactgagtttctctggccttaggtcctttactatagtagaggaatgggttaaacacaagcagagccctccagtcctgcatttaattccaagtgagagtaggtggaggcctgggctttcctgcaactttcagaagtgacccttcttcctttttcatagcctttggtatgtgggcggtcacaggctaagaggatgttataaacaaaaatgtaaagagattttaagtcctaccacttccatgataaatacccatttgagacttaaaaattatcttagaaaatattcaaagtaccaatgccttccttgacaattacactaacatcatgtgcacaaaattgcagtgcactctccaacaacttcacagagtattttataaaagtcatagccggggcaattaatgatgctaccatgagagtcccagggagaaaaggccctgtgaagtgtacagatgtaatagactgggtacaacttacagacctctagctaagggagtaagaagagagtgaaggaaatttaaagttgttatggatatacaacagtcacctcatgaagtatccaggataaaagaggtttggttgcttcggtggggttttaaaaagtcatgtgtctcttgaggagccatctctttcttatctgttccttctattcttccctctgctgcctgctttgccacctccgttctccccgaagacaagtagtatttgggttttgaaaaaaaaacagcactgagaacaaattcccaaagcaggtgtcagtgggagttacttgagcaaaatagctgggggcagagattgttcctcaattgcacactctcaaaaatgttaggggaaaacgtgctccatttagcacacatcgaataaactgaagcacgctaaatgtaggctgggaatcgtctcagatggatagaagggtggccctttaagttgtcagttgtaccaatgctgccttggaaggattggttctgacctctgaagcacaggtagaggaggagggcacaccattctcattggagcatcttggaattgttgtcagtgtttatctctgtgcgtgcatacatattgctgagtgctgcccctttcctaagaatatcagtgatcagagtccaggagtacattaacaaagcactctctgtctctctgtctgtctctgtttctctctatttttctctctatttctctctctatttccctccccccttctctctgtgtgtgtacattaacaatgcactctctgtctctccgtctgtatctgtttctctctatttctctatttccctcccccccctgtgtgtttgtgtgtatgtgcatgtgccccatcccccactgtagccaggactacctgttttcttttcctttctttctctctactccttcctctttttatgttcctctctggtacaatggattaaaactagaaccccatgtatataagttagggctttgtctccagctcttcttttcgtgtgcccaaatatccttcattcatcctactacccagactttgcttttagcttacacctaagtgacctatttcagtgagatttatgtctgtctggtgatgcatgtgtgtttatttccattggctatgcattcagataacagattctggagactgcaatctctaaatgaaaatatatctaaggaacatacagctgtgtctctcagatctgatcagcttgaatattgatagcttctaccaaaaccataaatgacatccttgtcaactacagatactcccttcataattattagatatgagaaaagaggggtgactgtgtgtcctcttgttaagcaatgcctttggtagattgcataggtaccatgggactaaaatgcatctccaatttaagtgtaggggaggctatgtatatgcagaatgatttaaaagatttacaatctatggactgcttgaacattgctagcattagtcccattgctgtacatagcagtgggggaggtaatgagtttccatatcaggcctagaacatggtgtaagtcagctctctcactccgggttatctgtttcagagaccagcatcaagaagtcagcttccaaactctgacaccattgcatacaccattgcatacactagcaagattttgctaaaaggacccagatatggctgtctcttgtgagactatgccggggcctggcaaacacagaagtggatgctcacagtcagctattggatggatcacagggcccccaatgggaaagctagggaaagtactcaaggagctgaagggatctgcaatcctataggtggaacaataatatgaactaaccagtaccccggagctcttgtctctagctgcatatgaatcagaagatggcctagtcggccatcagtggaaagagaggcccattggtcgtgcaaactttataagcctcagtacaggggaacgccagggccaagaagtgggagtgggtgggtagcagagtgggtgggggagcgtgtgggggacttttgggatagcattggaaatgtaattgaaataaatacctaatttaaaaaaagaagaagaagaagaagtcattacttgtactttatctaccctgcctgtgcgtctactgaccatgtgctggacatgtgatgcaactcaattctgctcattgatttctctcatctcccccaaggtgtttggaaacataaagttagatgaggagagtcacatcaaccggcacaacaacttccggagtttctttgggtccctcatgctgcttttcaggtacctggatgaacaaagactcaaactggagacctcgtggtcttcagctgccaaggtggggagaagcccctggatggagaatcctgactaggctcttgatctcttgattctgcactgctgttcttgttaggatatgcagtggaagtttgccttaatcaaactttcccgtgatttagaaagtttcaccactatctttgactcagtagttaatctgtgtatttcaacttgtcctctgggatggacacagcttcttatgggaacaatttaagacctgaaaccttgagtagctgtgtttaggtggagtcttggggttccaccactatcagattagacccttaacagatggagacatggtgggcgaggaggaagaacaaggaaagggtctcatgggcattcttctccatgtggaaggtattaaaagggcctcactgggttaagaaaaagtcctatgtgtgaataggatagcagcccaaggtaggatgggacataaagacttctaaccaagatggatttctgtgttcaggagtgccacgggggaggcttggcaggagattatgctgtcctgtctcggtgagaagggttgtgagcctgacaccactgcaccctcagggcagaatgagagtgagcgctgtggcactgacctggcctacgtttattttgtctccttcatcttcttctgctccttcctggtgagtaagaattttcctttctttgaggcatgcctggtaaagtgaaggctcctatagtgtgtgcacacattctcccctgcctcttagctcccttgttcctgatccctcacatacacactcacactccaagctatagaagaattagatcattgcctttggggaccaaagtgctccttggaatccttgcagggagggtgactcttattggttgagatctttgtgccttcaagaagagagtccttgtgagactggataaggatttgaacataggaagagagcaccaaacttcgtgttgtctctggagctactggagtaacccctgtcttctttgtgccccgtgtagtttatttaatagctaggacttgcatctgtttgggagattctgttttatttttaactgtttatgaaaaggtaccttgaaaatataagcttatagggttcatcagaggcaaataatgatcgcatgcagtgtaattggtgtgattctctcctgactatggtgcaacggaattggacggcagctggcaagcattctggtgtgaaaacgtgattactttgggtgttagtgaatattgaggagtatatgtagaacattcccacttagggaagtggtaagagatctgaaatgccctcttagttccttcttttggagagaacatctagaaatgtcttccccacacatcagattagcagtgatggatggaataaatacataaggtgtcaccagatcaatgaaaaggtcactgtagtccttctggctcccataatgtccctgagctcaacttcactgcaaatgccactggctgtacaaaactatataacactaaaatatcgctgctgctgctgctgctgctcaaaagtaggaccattcactgaaaagtaacttaactgtttcatggccaggccatttctctgaggggacagagacatgtgacaattcagctttctggtgatagcatgggccctgaagataggccattctgcctggtacataggttaatgtagggtgtaaagggactctgggagtcccctccccccttttggttttggctttgttgtcatttagtctaggctaaggcgcttgctcttatatagtgtcttttaaatggtatagacatgtcaggaaagagctgggaaggtagctcagtggaaaatggtatttgctgtgcaaaaaagaaagctgtgtgtagcttcccacttacctataactccactgctgtgggagggttggggaaattggtgggggcatggagacaggatttctggggcttgctcaccaccaattcagctccaagttcagtgagaaaacctgtctcaagggaataaagcaaaatgtgatagtgcaaggccctcagtatcctgacgtggtctctgtgtgtggatacataccattcaagcactcacacaaacacatgtgtacttatggcatactcatgtgcatgagtatctgcacacacatatacatggtataccttatgcttgacagcagtagtattaagcacagtgaaataatgcatacattttgatatatttcttttctatgggcgtgaaactttttttttcaatgaaaaagaacacaggactgtttataaatctgaaagcacaatgtataataaaaataactgaaaggaagttaatccattcacatcttcagcccatttttatcaagtggctactaatgactggcactaagctaggcaccagagtagaactgtcagcaagacatagtctctttgtgagctccagtaagaaaccaatatacagaagaattaacacttatcaataagaataaatcaaaacagaaagggacacatagacctctccattttaccttatatagtttaaatgtttgatgataaatatttaaaagaaaccagagacaaaagtgaaaaattaattagaggctgtacggtcacttttagaattgtgagacggagagtgctacataattcacattaatgttatttttaatgaggctatattcagtgtgagatgacttgccttcatgtctcagtcctacaataagactaactttgtgacctcgggccagtcacacactgcttatttcaaatcaaccatccaacagagatttctgaggcccttggatgtgccagaccatgtgctaaaagctaagaatgcagttgtaaatcagaagcatctattttctcaaagagctgatgggaattaaaacttcctcctgaagggctgaaaggagcatgaaaaccaatagtagatgttaatgtgtgcagcacactgctaaaggatgcaagaatatgaagcattagcaatgctaatagtttttattaacattagctattaacattaatgattagtgccccgaaaggagtatgcatataaacagacaacactcataatccaggcagtggctgaataaaatctcaatgacagagggctgtgttgggttcagctatatgaaacagcagttctcaaacagcacctgaaacaggagggaccaggttttctttgccatgttagtgaagtctgaaggaagccatcgtgcttgttatgatggcctgacactggatcatttctgtaccaactgatgaatgtccttcaccctaacgtgcagaaaagacaagtcaaccttcagtcatccatttgtaaaacaggcagtggtaaaaagggaccatggctgttaggatatatccaaccttctccatgttgcaaagactataggaattatgtagactttcttgtagactttctctgtagcctatattctctgcctgcatatttgacaagcccatgaacccaaccacttaaaacaaatttttctatcaggtgggaatcttgaattttaagtgtaagaaagcctagctagatatagcataaacaaaatgggattttataagcacctgtcattggggtatcctagggcaaggcaagcaccaagataaattttaattccccttttcatccttctctattcataaatctttccctttatgtgagctccttcttcaaatacccctatctgatgtcaggcagctggagtagcaactccagaccttacatcttctcatgtccaagagtaatagagatggccatgtcttttgcccaatgcctcttcattggcttttgttgaatccccactcatattgagctagagaaaaataggattcaatgactgggtaaagcttaggtcacagtatgatgccttattgaactatagtactaggccaggccagggcctgtactaggagtaatcagtggcatgccagaagcacaacagaactgtttactggtctattcttgtctttggtactgtcattgtgaatgagtaggcccaggagcacaccattctcaccctggttctatacctaccttctataccattaccaaggttatctccaaagacaaatagctcttggcttgcctacagagtagtatgtactacagatgagcagaccctctagcccatgggctaatctgatttgctacctggttttatatggtccatgaactatgaattttacagtcttaaaggagggagagacaaacaagagatgaataatattctcatggcatgtggaaattatatgaaattcaaattccagcatccataaacaaagcttccttggaactcagccatgctcattgatatttctaatgtgtgtggctgtttggggtggtggaataccagagctgaatagctcagacagacacagaacagcccatgaaacatacaagaatgtctggctagttggctggttttggttcagaccagagcatggtaacacgatgctttggtcatttggtacttggccctggatgttttactctacttaaggacccctagaatgtccctgttcctacatatctctgttaacattcatgctgcaccctctgcgtaaggcactgtcttctgcgcttatgtgatctggtaagtatgacctgccccatcgtgcttcagttcaaaaacctagtgacttctacaaagtttttttagctactagaaattccctttatagaattttctgtctctattgtcacttgtatatgatgctctcatggctgctgtgatttgcaacctttttctgtttccaatatatcactgtcttttctaaatactagataagttttcaagagtagtcatacagcaagatctagtgaaggcctgctttgcactgtgctaggcgtgagggtctagctctagactagcactttctgacctcatatcctagcacctccagaaacagagtcgctgagtttgacacatactgggtacgtagtggagaacagacccatggacagcttcgcacagggagcatgctctttagctctgtggcactcattgtgctctctggggactctattttcataaagcaggatgaggatggaagctggcgagacaatgttgttatctggccttgactttctctagcctttaagaatgtggaaagcactgttccctctgctacaagaacaattaagtaagtcaaacaggtaatgacagcagataacgtattgtgcgaatgaaaagcagcataaaaaaaaagaataaactcatagtgcccacacaatgagatgcacggtctgagtaacaaaagtgagttgcatttagcaagctttgcctaggaactttgccttggagcctgtccatctgtttcctgagctctgccttaatttcctcctaactcttctctttctttgccctccagatgctcaacctgttcgtggctgtcatcatggacaactttgagtacctgactcgagattcctccatcctggggcctcaccacttagatgagtttgtccgtgtctgggcagaatatgacagagcagcatggtgcgtaggccttttggccactcagaaattaggggcttctagattgctcaaatacttgcctgttataaaagggaaggaaacacctcttggttatagctcacggaagaggcactggtctcaggccattcacccaaatcttctctccctgggccttctgcacccctctttctttttgtggcagactgtgcccttgtttgccaatttcattatactctagattgactacacaaccaggggagcttccaacctgctcccttttttgctatgagtcaccggggactcagataggaggtttcgggccaatgggacatatctggccaccatggttagtggcattagtgcttttcttcctcattcttttcagcatatatagttaaataaaacactggtataatatttcaaataatcaagtaggtggtcctgccaatagatgccctctagacttgtgggcttttatcacatgaaactgagttaaatggcaggagctggcagggctgacctctttgctgtctttcactgtccaatagttccgatgtgatgtgacatctagactttagagcggggatcagcaaattaccacctgtcagttaagtttggctcactgcttttacaaatgagtttttatagaggtacagttacagccatttgtcttctctattgtctatggctgtgcttgcactagagtgaaaaactgaataactgggacaaaggtggtctgaccttccagttcaaaatatttactattaaactattgccaaaaccttcactctttaaaaaaaaagtcttttgacccctgtttcaggaacaatgacagtgtttttagcccttgctgatgaggacagtatgacattctatgaatgaaaagctttgctggcccaggcaaacttagcttctgggtcttcactccccactctccccattctggtccctctctgaaaatacttgaggaaatgctcttcttcacaggagtggaccaccgttgcttccacctgatactcccttcatgatgtgtgattcttccccatatctaccatctgtgaagctgctaaacctgggttaactgttgacagggtggatgggtgaattagaattcctttctcttctgtaataatgatctaggccatggggagatgtagatcccttcctgatatagcagctaagcaacagatttttcttgctgtactcagtttccaacaaaaagttttagtatgcaaccggcgatggcttggaggacaatgatgctcagcctaaatcttagccattttctcactttggacaagtgatgtaaccatctatcaagtggtggtaatgatacctacctagcctggtgtgtgtttgtgagcatgtaactatatcatgcatactactgttaggtacttgacaacatggtatgtgaatgcaactcagaaatgaggagaattgccatctgtaaagcatttatggccttgattttggatgcctattcactcacgtaactgaagagacactatctgctaccaaaggatggcatcacacatctagcctcactcggacatccttggctcttggaaccagcacttcctttggttttatttcctctgtggctctaagtgccaaatgccttaaagatgcccccacttcattgcagttgctgggaagaggctgcaacaggactaatcatgaaacttggtcacatgaactgagaaggaaaaacagagaggaactccttctgtcatttcgaatgtctagagaattaccaattattctggttacatcttaattggttttctcaatggaataaggttgttgagaagaaaccagcaaacgtgcaatgagtcagggtcttcatataaagaagcaatgagttgaaagccactacttactactcttaagtaaaaataaactgacacatgactactttccatcattccaaggggcaagagactgggcatgccggtgagctactgtctggaaagaaacaagacaaatcagcaccgagtcaggaaaaggctagaaagagtgaagctgaagaaaacatttgctttgataacgcttcctaaaaggatgcttagatggagatagtgtgctcatcgtttctatggcaacccccggcctggtccagggtgcatactgactttcagatcccaccatggcttccttgttctggtccctgacagggaagatgttttaaccactgagaattaatcctatgccagttattccatttccacaagaagccagaagtctcttgaaggttcctggaagaaaaggttatcaaaaaagggtcacagtgttcctggaattctgcaggatcaatctagaccctgagtggctggaatggagctgcagggaaatatttctagggcatctttccagattgtttttggacacgaatcccagtaggctcctgtggaatagagcagcgtttacccaagctgaactcagtatatgtcacagagagatccaaagccctttcaaattctctcacgcaaactctgtttcttgctaattagcctagtgggaaatttgtctctcacagtctacagaaacatgctgactccccactgcccctgacaggtggcccgtagtaactgcctgtaatcagtatgggtgtgaaagcaaagagttctgtagtccacacgttggcaacctgacatctgctctggacagtggccagagacacactggctgtctttttgctcttagaagcctagctggagcttgggctcctcaggccaggagtgagccacacaggtatttctgggtaccttaggcattaggttcctttggatattagatggactcggatttcctgagaaaattgggagaatagtttggcaaggtggtaggtagttctctggttctcatcactctggtctgattatgtcaggcaccaataaactggccttacctctttgggacagtccctgtagggagaagccatcgtttcttccccattcttttctgagtatcttattaacccacctgtgctttctttccagcggcaggatcccgtataaggatatgtacaaattagtgcgggtgatctcgcctcctctgggcctgggagagaactgcccctacagggtggcttgcaaggtttgcccccccagtccccagccatgacctgcagtgggatgcagcatctaaccctctccgccctctgctccaccaccactgcgccacatgagagaaccttcatgttgcttacctttgagtttaaagaggcccaacccctcccagaaccagcagctgccgtataggaagaagggccattttatggtgaaggcaaaagagagttaaagacttaatacaaaggccactagagtcactccttttggcttttcccacaaatatactgttgtgcacctacacatacatcccccagtttaccctagcttgtacattctaccaaaggacttcccccttctctgggatgcagaaatcctctaatcaagcaaaagggttctgatttcccttcacgagaccttcattttcattgaaccacatgatttcagtgaacctagtcatccctacccctgctatccctcacagatcctgggtgctttttccaagatcagcaatagaagctgtaggacagaggggaagagggcaacaggtaaacatggtttaaaaagcatagaactattagagaatttcatagcacagagactaaaataacctcaacagacacagaaggaccttgaactgattatttaatgcctttggtgcctgccagtcacacttgtaagaggtctgccgtaattgccaagtcactacttcttggttagaccaacaggttccgagatataagttcaaactctgcattacccaggatatacagtatcctagtcgctttcccaagcccaggaccgctaaatatgaaccctgcttcaggtgctatgggaggaaagcaaagcaaagagctgctcaggcagcagaagatacaggctcaggaaggatgtctgcctaggtgatggatggagctgacttgggatggtgaccctgattctgaactcaggaggctgaacagctgcctctgctgagactctttaaactccaccccagtgaaacctgcagccgcatgtgggagagctggggagggtagcatggcatgcaagatgctcttcttcctcctggttttgtttcttctgtccccagcatgccatcaacctggtgcatgctggggaataaagagcactcttgttcacggagccaggtggaagcaacggggcgactttctgaccagcaatctcagcccatcactttcaacgcaaacggccgccgcctcctgctgcacacataccacagaggggggatacacgacgttctgcctgtgggttcagggcaggggacaggcctgacttctaggccagcatcccagccccagtaggggccagaaactcctacccacggctggagcaccgtctatccggtttataccgctcacgcacagccctgggaattgaagacatgcttgtgttactttggggttagatgcagtgaaccacaaagccagcccagcactaactgaggaggagaaagtgagccccgccctcgacccctgtcagcaccttctgactgtgtcagagggaccagaggttgtaactagtgttcccgggtctgtgtggggcgtgatataaatctgcaccaggacggagtcacttgtatgatttgccttgattaacaggtctcctgttcttttcctgtttgtccattttgtttgtttttcttctgtttcttgtattactttgttttggctctctgggaatgctgttcctctctcctacttgtctgcatcctttcccccacccccacccccttttcctgtccctgccaccccctcctgccccgcccatgtcctgcccctactcaccacccccatgagcagtggccgcatccattacactgagatgtatgaaatgctgactctcatgtcaccaccgctaggcctcggcaagagatgtccctccaaagtggcctataaggtagacaaccccttcctttgttctgggctagagaccaacaggaaatgggatccagttgtggggaggacatactctgggaggaagctgggttgggggggcgcggagatgggaagtgaggattcaggagtcaggaaggttcatgagatggagtcataaaggatacaggagtggttctcgtgctgttcaccgtggaccttttatcatgttactgtgttcctactcgtgtgtggcttcttgtgagtgggctactagaaaggtgctgctaagtggcgtgtatcctttgaaaggaggcagagtggtggccggggaatagttggattggcaagaaggaaacctatcaccaaaaaggctgagagaaaaaaaaaaatatggcttcactcataaattaggaaaataatggagcaatcgttaaggattgttctagaagaaatttttagaagggaaacttgtaataaatttcttcccctgtgacgtaggaaggagcaacagcatagcttcctgacacaaacacaaaagaagaacatgtcttcaagcattttacaactgacaggaacgtagctttccttccccagtggccttaaagagggcaacaacaggcagatttgttcagttagctttgccttcttagcatgaccaagtggtgggtagatttcttgaggtcatacaccagcattgtccactgggcgtcgtcatttggatgctcccagcttcggggccgggcattttcttcacctatcagtactagttactgttaactcccttgtgtatagactggcccagaactactcaggggctttctcattcgcctaagcacacatcatagcaaggttgccactaccacagaagtaagaatgatgggactcagatacaaacaaagaaacaacctttacactctagcacatctgtctgtagagttgctgttggcaagatgatctatttgagtaatagaggtgtggcttgtgaacaacaggttccaatcactaccaaccacaaccaccaggataaaggttctgccagaggcccttctgctgccacctccaaatagtcttgctccagagagtatcttactggaatgtagtccgtaggaaccctcatccccaagtgcatggctccttatacacagcagatgcgataatatctttctctgatagccacaagtatcacacagtggggaaagaattcctgggatgaggccctgatagaatgaactgggagaggaatgggaggagagtctcacggattcctaaagcaagatactctctgaaagtggatttggccatttcagttggatcccttcctctgggtgaggggaacagggcctgcccactctgctcctgcctgcacctccttctctgactgtcttccctgcgctcctcctcctcgtcctcctcgagcctgtttgcactctcccctgcccattctgctcctcctcaccccttcgataagttggactctctgcatgttcaatcgtgtgctggcaaattccatctttgaaagacttaaaaagggggcaccaggatacatctttcaagtgagatgaacagagccaagtctcttccccatctttccattgaccttgggggtgtttgtgggaacaagtagaaaacagagagcacctctgtagcagggagtggagccacctctcagagctgactctgttccctaagggacttcttgaactcccttcccatctctctgggagatattcctagtactccccatgggaaggggttgtaaagaatgattagctaacctcctttccttggcatttggcatcagtccctagataaaataaccacaaatgagctttagtgagaagctgggagagccggactggcatggggatggggaatccttgcccttcttttctgtctctgcatttaacctctgcactttccttccccttttatttttaaaccaaggtgtctttcaatatatttggtttttgcctgctctttctcttttctctttcacacagaggctggtcctgatgaacatgccagtggctgaggacatgacagtccacttcacctccacacttatggctctgatccggacagctctggacattaaaatcgccaaaggtcagattagtaggggaagggaagagggttgcaccctatgttatatcctgtgcagcctgctataggatggagtcatctgaactacttcccagccagccatgctcctgataaggccgtgacctggttttacctctgacttagtaatttgaagacttgtccttactttggtaaaaataaatgacttgctattccatgcctgacatgtcttagcattctagaaatatttgttgagcatagaaattttaattctgtaattttttccataaagcatcgtttctccaaagtcttgggacttaggaagcatctgtagcaggtgccaacagagtggacacccatcatgattgctattcagaggtctgggggagaaacggtctgtggcatctgtacagacctttagcctgccttctcctgcctttttaaagaatcaggtcccttaggctgtatggtcagggtcagtggaaggaatgatgtgtattgatgaagcatgagttttccttatggatgtcttcatttccctctctgatgtactgagcacccaggaggctgttagaatcagtgaggaagttgatcttggtctcagcctcagatttctggggaagaatatgcctgagtcactgaaaataggagccaaagcgtcttctgcttcctcagcaaaaatgctggtgttgccagatcctctgtcacttggtgcgagatttcctctcattatgtgaggtgccatgctgattcagctcctgcccccacccactcctcagtcttggtcgtcattattctgtgcctgttctgattgggttattaataatttatcttattctaggtggtgcagacagacagcagctagactcggagctgcaaaaagagaccctggccatttggcctcacctgtcccaaaagatgttggatctgcttgtgcccatgcccaaaggtgtggtggctcctccttccaagtgtgcttgtcaccgtggcccagcatgccaaggccacatcttttagggaaaccagcgtgatcaaggcgataagggagggttgctcctttaccattagaaacctaagtccccacttctacagtacttttattcataattaattaaaactaactttttaagacaggtcattacttttgtgaatgaaatttctctgggaacatagctctcttcctccgcagaagactgttcagtaaccccttgtgcatttgtgttgctacttagacacgagtatctgggatgacaggaggccgtgctcactgatgtctttcttactatctggtcctgtgagcactgccttttttgcatggatccattcgctttgtgtccttggagctttaataaatagatgtgtgagtgacttagagcacgaagctgctttggagagtggacacatatggccatctgtatcctccctgtttattcccatgctccacttgtgcttctagcctctgacctgactgtgggcaagatctatgcagcaatgatgatcatggactactataaacagagtaaggtaaagaaacagagacagcagctggaagaacaggtaagcaccattgaaagcacattggatgggtcatgagtagacatggatttccagagggcaggttgcatgtatccctacaatgtaccctaaaaaggtggaaggggttttggagttcaagaactttcaaatgaggtgggattagaaacctggggaactgaaaggttaaaatagtcgagcaaagaatcagtcatctttctttgtctctcatgtaagttgtggtgtttttcatagtagtcctcacaaagtcacaggaattctttgtctccactcagaaaaatgcacccatgttccagcgcatggagccctcatcactgcctcaggagatcattgctaatgccaaagccctgccttatctccagcaggaccctgtttctggcctgtgagtaaaaaccacatgaagggtctgtgggacgcctgtttgcattctgccaccatggttcaggcccgggaatcatactctgagccagttccttcctgaggctgactgtctcaaaatggcttgtcagcaggagtaagagaagaaatgagccaggcatgtgtgatgccgcaactggtatcagaggcagtagatgcagcagaaggttggtagcaaaaggtgctgactcacgttataatgcactaacaccttagctatagttctgttggggagaattagcataatctcaagggtttagttgtcttctcacaatggatctggcagcatggatgtagagattgctgagcagaagggggaaagagaagcaaccgtcactggattctttgctcctggggatgacagttgtagcaatacagtttgcttagctctcttgattctgccataccctggagatgtatatattgctatcactacttttcaaatgaacagacagggactatgactgagaggaggcagcacctaggttttcaaatcagtcatttctgattctagaggctttctactatatcttagactctggaatgaccaaaaagaccttataaatggaaagaaaaaaaaatcagaccctgaatggaagaatggtctagtgtttctaaggcttacctactggttgactgttagtcagagatggtctctcatagcatacatatcccagtatgtcattgttttccagttgtcaccgagcggggagtggaagccaagggacacatgctcctcttctcattggaaatgaagttatgtggttgggtttaagcaggtcttgcttggagaagtgggaatcactaagaaggacaattccactaatgatcagaaaagggagacccagagtttgggaatgaggcctccattggagcactactgggaggagtccataccattcatttctttcacactgtggtatgaaactttgttcttgcaaatctttttctgacttcataatctaagaaatttcaaagagaagaacatgcccagagctttctttacaaacaattttgtatgatcagagaacagtctttggctactctgggccccagaaaacaagtagaaatacattttattgctctgtggagtagagagagagaaggtatgactagagaaatggggtctcctccctgcaaggcttcacactattttttcatgagtccttgatctattagtggaagatactcctttgcccttgcatctatatctctgttttgtctagaacgtctacataagccaagccacaccatgggatcatcactctgaattttcttccatatgttaatagattcaagctgctcactgatttttaccaatatttgttgagaacaaattttgcctaagcattggctctggcactagagatactgatgatcaggtcatagtccccagggatacaaatctggagaggggaaactataagaatgatagattaaatgtgggaaggcaggacattgtgatatcatggaaaggaagctacttttctcatttgagatcttggtgttgggtgggaagggtgtatcctcaagtaagaaacatagagacccaagggcaagttcttcaggaggtaaactgaggtaaactaaggtacctatggactacaattggagtagaacatctaggaaaggtggctgctgccatgtttggagagctgcacagtgacaatcttagagggcattctaagccacgatcaagaagttaaatttattttgtcttaaaataatggggctttatgtttcagagtgacattattagatttgtgccttgtaaaattcatttatgaattcaatgtagatttactggatcagaagagaacattctagggaaaatttctagagatgatatcatgtagtagcttgctgaggttatataaattttcggtggcagtggtttgaacaagcaggctagaaatggcgagaagtcagtaagcaggatatttaatagggagaatggataggatttagaaataggtttgctatgaggagtaaggaagggaaaggaatcaagaagagccttgtgcttcaagtgagagcctttgggtggacagtgctacaggcttgagagccaggccctaatttagagagtgctttagggttacagtggtgaccacaggaggcagagctcactcaccacacatacaccaagtgaccttacaaccagagattcaggcctcaaatgggaaaactggcagagaaaggagtcatggtttccaagtacgattgtgataaattccagcaagaaaaacagtggcacgagaggggggcatgcaagagttctcacagagatcaagactattttctgaaggaaataacttttggtacaatgcctccaaagtatatggaaagagtttggtggaaagcagatgtagcctggctgttactacattcagcacacttaaaacagcatatatgtggaattctgggagcaaaggacaggaatgccaaaggaggttggtgaggtaggaacaagagcataggagaggccattttttaaagaaggttatcactctgagttgaaattatttatccttggagttgtttagcgattctcagggtcctgtcaatatataaagaatagaatttatatttataaataataaataatgctggatcttgggaagccccaaagtgtggtgccttgtgtgatgagggccttttagttttatcaaattgttgagaagaaatggaatagccttgttaacagggacctttgtctttttgtgatggagacagtgagagtaatgtaccatgagagccccacctccacagcctcctcagtcctaattatcttctgaatggcctactttcatataactttagtaatgggatttcctgcacatgaactctgaggacaccataggaggtcttcaccaccgaataaagagttaactgttctctctagaactcatggggccatgtgctgtacttgcaatgtacctcctgttccctcgattttcaggagaaggcacatatatgaatgaatgaataaaatgaatgaatgaatgaatgaatgaatgaactttagacaggtaatgtcaatatgaatgactctgtgggagttgtaaaactcttacactctcacagtcatggtgaccctccaacccccagttgattctcttctatccaaaccttctctttcaaggctaaatctagtatgattctacagacagattattttaaaataagtagcaattcttgttcactcctctaatttcctatggggtgcagacttcagcagtagactgttatgagaaaggcctccctagagagaaggctgacatttggagagatggtgtgtcatcttgtaggactatgacttttcagagagtagagcttcatagccctggcctcttccccctttccccagagtcagggagggcttgcttatattcttgcttaggccaaagaaaactgctaccatattggtagcagtgagtggcaacagaagccaatgtttcaggaagggtcatctggccttttcttctaaccaacaccatggatatgattgtataggaattgctgaaccaaactgacttggtggtgatctaccaggccaacccccatatatttcactcggcagtgtttttccctacctcatcattttctcacacatcgcaagcaatacagcaatacaggggctttgcttccctctaaagtcatctttcagttcatgaaccaacaatgacagtgaacagcacagagaaaccctttaggaaatgttcatggagctgaattggatagagttgagcttagccatggatgctggcacagtcaaaccattttaaagactatgactgcttaatatttaaacaagctgttcactgtttaaactctggcatttttctgcccaatgagggaaactcaacagaaacaggtttacaatctagcactggtcttccatatggctgagtgtgacaaatgatgtcatttgtcacagatatgctggtcgccagcagaatgatgaatgattccaaatgcaggttgaaaacaccagtttctatgttttcttacgctttcttaaacatcttctgttctaagaccagccacctgcaaatcaacagatttatagaccagccaagagtgcagggtgcgactctcgtatggaggaagtcttctatgggatgggacttgctagtggaagttgtggcatgactttttctctgtccctcattacctctgaatttgacattgcttttcaggagtggtcggagtggatacccttcaatgagtccactctcccctcaagaaatattccagttggcttgtatggacccagcggatgatggacaattccaggaacaacaatctctggtgaatgcacaagtacatgacctcagaagcatttccttggtctcctgatccctttcagcctatcttcagccccttcttacctagtttctcatgtttactgagaatgtttcctcttaaggttttaaaagtaccagagggctcttctctcctgtggggacttacatttcttcaggtcaaacccttttcatttaccaaattttgaagcaaatataaaaaaatcttgcctgtgatagtaagctttaagacagtctgatataatgagtggtatctatgcatattgtatgctgtactactgagtgttgcttatgggaatatgagaatgtccctagtatccttgagtgaagcccacctcctctaatacatagtgtttgcatctgcaacaatgactagctgcctgacagaatatatggaagacttcaccacttttgttatatgtgggctcaggcaaatttcttcccttcagttataattttacaatgtcacatacattccaaaaagcccctaacatcattttcctgaccccaagataagtttttcattagtctggatggtaaaatttctgagaaccctaaagtcaagttcagccttggagaagagagcaccagttaaaaattttggctttactagtgcaaaagcaaaaactgattgccaaactaatcaattttgcaattattcctagcttgggagttgtgagttccaagtttcctcccaggcctaattggattggatagaacaagacaaaacctagtttttgcaattgtctatacagtcagccggcattaagtgagctgagcctcattcctttaacatttattggtgacctttttcctctcagttgtctcatgaccttatatatatcccagaaccatgccaaatggatgatgatgatgatgatttgatgatgatgatgatggggtgtgtgtgtgtgtgtgtgtgtgtgtgcgcgcacgcacatttgtgtgataaagtagcttctctacagagaggagtaactcagctgggtaattctgtcttctgtgcttgctgagacagaggatcatgcatagttgtaatggaaagatggcaaggtcagatatccctggaatactgaacaacctacccaaggatgttcttggtagagtgggtagggcttctgacaataattgccctcttcccctaactgatttagcactaaaatctaggaacttggttgatatggatagcttgattctgaaaattcttctcagttctttatgccttgccaaccgagttggtaggtgtggtagagaaaaatctcaataatgtgtcttttccccactcccagggatgcttggctaccgcatcacttctgtgggtttccccaggctgagacgtagcaccagaacttttcggatatgtgttcatcttgtcagtgccggtgtctgtaatttaattcaggtgtcagccatgaaacaccctcaccactgtctactgcccatccctctgggtccctgctccatgtcctgaggcgtggccatgatttgtgtatgtgcatatggagtgtgtctcacaccgcctctgacacctgtagacttcaatgtcattgctgcatctgtttgaagttggaattgtgtgccacattatcgcacgcactacaaatgctgtggcctcctcaagtgcacatatcacagggcccgggaaggtcctcttcccagccacaccagtagccataaagttgaccagccatcccaggttcccctttctttgaacactgacctactcatgcacccatattttagggtataaatagctaagtataaaatgacatttttttttcttagaataatctccagatgtcaaagatatttctttgatctctgtgtggcttatgtaagtagctccaagatttatacaattatacaagttgtcttcatggtaactcacattcttgaactaggaaaataacacaggagtttcagaagtaacattttccttactaacctcataacactttgtgggggcacagttaatacagtaacatcagtaacacatataagactggtgaacaattggaatgttatgagtccaaatgacatgtaatcattattcttaaaatggggtaatctacatgttgacatgataatacttgggtatattaagttaaataaaaatgtgtaatagaatttttttaatgatcacatatttaatcataaaagcagtttgcattatatttatggttagtacatttctgacagatggttacccactacatttttggatggctttaattataaaactcttacctaataaactcataacatattttctcttagataattagcaactttctttcaaatcctggtttctatgaaactgataaaaaacgattcttcaaagaataaacacagtaataacacccatcagaagatatatttcacacatgtaaagtatccaatgagcataaatgtttgcttgataaggctataaaaccctgaggagttcttccaaagacagtctttacctcttcatcccattgagaggcttctgtgtgcgatttctagcatcacacatataaaattatgcatgtgtgctcatataacacacctacaactagggcctcataaatatcaggctcccttctaaaagccatttctacaatgggggctgaaccatcccctggaattgagaggcaaccagatggaaccaagtcccacaagcgtggctgtgtgtttatttccaggagccagaggttagtgaattaaaaagtgtgcagtcctctaaccatggcatctaccttcctccggacacccaggagcatgcgggatctgggagggcatcctctatgccacgtctgactatggatccccaggtaaaactcagacaccacacaccttatgcagtgacatcccaggctttattaggtgggttatgaaatacctgatattttcaggtaagccctgagctttcctctaccccttaactacacacaagacctagctcatggaccatctctgaaaaagttttctctatattgtgtttttaattaatcttgccttcaagtgtctactcaacaacatagcatctcttttcctgccctgggataagcattctcaggacccaatcaaccaagcagcaggcatttttctctctgtattttcccatccttttctcttttcccagccaccttggtacatgagttatctgtacacaccgctctatgtcaggactgtcgtatccagtgcaggccacgcctcatctctttgtctgttttcttagcttctttgtctgtcttacatcaagttttgacagagacaagaagtttttgtggatctgttctaatacctgtgacaatccaaagcaccagagtttgtggggctaggatggtgggggcatagtgatggcaggaaggtagtacttccttagtggttgggttgcaagcttgcctagggtaggaagctctaagtaagagccttatctgctaagtaagaaatgtttccctcaaaatatagccttttagataattgctgtcacctatttcaaagtgaccccccccccatttacagcaggtcctgactgagcacctgtggtagatagttctatgaggcatttacacagtgcctgcccacactgcacagtaagtagaatcatctggttttattcataaaaacaaggagacaatccaagccactctcagtgatggttagcttacataggacaccttttcctgattagcctctgcagccaaggtttctgcaagggggattcaagggaggtgacaatttccagggattatagctcaccattcccaagagtttcagtaccgcatctggatcttcagactctttcagtgattaatccagactttgtattcctctggggggggtttcctttctaggtggtaacagaccctagctctatgcgacgttcattttctacaattcgggataagcgttcaaattcctcctggttggaggagttctccatggaacgcagcagtgaaaacacttacaagtcgcggcgcagaagttaccattcctccctgaggctgtcagcacaccgcctgaattctgactctggtgagagagtcatttttagcatgtgtctgttttcctggcaactgatggacctagtctttataaggatcagtagtgactagaacatgatttagataaagtggagcatgatttagataaagaccagggtttaagaaagcgaagaaaggcctgggtagatggttcatgtgtaaagagcttgctgtgcaagtgtgaagacatgggttcaaatccctagaacttacgtaaaactggagcacaacagtacatatctgtaatctcagtgttcctctgacaagatggatcctgctattctggtttatgcagccgttgtcactaaagtggtacggtctcaaacatggcagcacaaaactaacaccaagtcctctgacctccacatacacactctggctcacctatgctaacccacctatatgcaaactgaaagacaaatgctccagccaaaatgctgctctctctgaggtatcattcggaaactgacccatgccctgtgtggtcatcacaagtgccaatgctattcaccaaggttttcagttagccttttacaaaacaacagagattccataggaatgtcatggaagccactgcatccccaaaaggcactgagctctgccagcagctcgttttacccactgtgttacctggaattgtcccatgcactgaggttcatttaaagccttcctgttttactggttttgaaaactttaaaaatcactcatctcattccgcttacttcactagaggcagaaatcaaacttgaaaaccagtgatcttccccaaattgagagccaggatgtggcgtcataaagactagaatggagatccttcaagttagatccataggttctcaccctaacattacattagatgtgctagcatttcgttcattgaaccctccaaatccccttccttgtgccatcttcttaagtcaagtgctggacacagacaatccctgagccatctggcagagatactgtttactgtatctggcataaaggaagcagagaaaacagttgccactcgttgatacctgtcttttcagtggtacctggcagactcacttgctcactaaaagtggaattttctacctttttctgtcccatttcccttttatgtcacctgttgatctgcctggagaagccagggcacttcagtcagttcaggaggccatgaaatatgagctcaatgggacaacagtgtctggtggggacttcctcttctcatcatgtcctcacaggagagataacagggacaggaagcaaactatctctgggatacttattctaatagtaagagcttcaccgtcctaagatagtcacttaccaaaggctgtacatcctctctccattccactggaggttagaattcaacactgaattctgaacaaacacaatcagttcacaatggctcaaatccctggttagggtagaatctgtggcttggagttcagggtcatcaagccagaatgggctgattaacaataaccaattgttatcacctttcacaggtcacaagtctgacactcaccgatcaggaggcagggagagaggccgatccaaagaacgaaagcacctcctctctccagatgtctcccgctgcaattctgaagagcgagggacccaggccgactgggagtccccagaacgtcgccagtccaggtcacccagtgaaggaaggtcacagacccccaatagacaggtgaatatagagaagttgagcctctagcaggtcagggaagggtggaatgctgtactagaaggggcttccattgcctcatgtcagcctctgggacctcagctcctgatgttcacaagagataaccactgaacacagagactggctgttctgtgcttgcagattcagaagtggcaggaattcacaagaaatgagatcctcccagtccccaagaaagacaatatctggaagtcagtccatgcctgtcctcagtatcctgatatacaaattcagctagacttaagaaataaagatggcctttcagcccataaggtgtgattctcagtaccaactgcaatgataattcatctctaaagccagaatttgcaagttggacaactccactttgcttacggattgtgtagccctctcaggagaaggagcacatctcacctctccatcttttcctaattcccagtctatgcctaagaaatagctgtgtagcagtgttctttgtgttgcccctcttttccagccctaacccttctcaaagttcctggagtccagatggaagacacatttggttagaaatggtgagccaagaacaagagactgttaaagcaattctgagacatagcagtagagaaatttacccaagacatagtggtttccaaattgtattgtagaacagagccagccctggagtttgctagcacagcaaatccctgaaactttgaagaatccaatgagacttgcttaaaagtcaaacccagaatttcatatcttaaaggaccccaccccagaaaattcttacaggtggctcacagatttaacacaccttgagagaccagtgctggaagccatttgccaacacctgggctcaagtatttcatggactaggcaaggaagacagataagggcagagacaatagataagggcgtgttggccatagaagccaagggcagcaaaccatcactaatagaggggcaagaaaacaggctttaggtcacctcagatacttacagtgtactctagttgggcgaccaggtgttagggattagttctagtgcttgtctaagggtccctgcccccagctggctgattggtaataagaattgctgtacagccaatggctgggcagagagatggagcaggacttttagattgtgcaggtaagggacaaaaaaaaaaaaggaggaggaggaggaggagacttgaaaaagacagaatcaccatggcagggaagcagaaagatgaaactcaaaggctcaccggcatgtaagaatctgggaacataacttgtaataaggacacatgctccactatattcatagcagccttatttataatagccagaagctggaaagaacccagatgtccctcaacagaaaatgtggtacatttacccaacggggtactactcagctattaaaaacaatgaatttatgaaattcttgggcaaatggatggatctggagtatatcatcctgagtgaggtaatccaatcataaaagaacacacatgatatgcactcactgataagtggatattagcccagaaacttagaataccagagatacaatttgcaaaacacatgaaactcaagaaggaagacgaaagtgtgggtacttcattccttcttagaatggggaacaaaatacctatggaaggagttacagaaacaaagtttggagctgagactgaaggaaggaccatccagagactgccccacctggggatccatcccataaacaactaccaaacccagacactattgcatatgccagaaagattttgctgacaggaccctcatacagctctctcttgtgagtcagtgcctggcaaacagagaagtagatgctcacagtcatctattggatggaacacagggtccccaataaagtagctagaggaagtacccaaggagctgaaggggtctgcagccctataggagaaacaacaatatgaactaaccagtaaccccagagctcgtgtctctatctgcatatgtagcagaagatagcctagttggccatcagtgagaggagaggcccttggtcttgagtagattctaggccctagtatcggggaatgctagggccaggaagtgggagtgagtgggttggggagcagggagaggaggagggtataggggattttcagagaagaaactaggaaaggggctagcatttgaaaagtaaatgaagaaaacatctaataaaaaaatcttagccgggtgtggtgttgcttgcctttaatcccagcacttgggaggcagaggcaggcagatttctgagttggaggccagcctagtctacagagtgagttccaaaacagccagagctatacagagaaaccctgtctcaaaaaaaaaaaaaaaaaaagaatctgggaaaatggccctaggggctacttcccctttgggtctgagatagcagagatgtaataatagattttaactcaggtatactggaggagagtgtttgctagtggtggagaggtttagaagtgcccaaccattgatctagtcaagacatatcaaaattaatgtctgtgtgccttacattcttgaatccaaagctcttgggcaggtgccatgtgtactcaacctgctgtaagccaaagcagtttaacaaattcaccactacaaaagggaaggaagagaaatttgctcttgcttagaactcgtttcctgaacagactgggattctaagcatcctttcagagagctgtttggcctagaaccttctgatattcctgtatgcagtttccaggtcctggctagccatctgggggttttattgtcacagtggtcaggtctaccccaaacccatagtggctaaacctgcatcattagttgaacttgatttccagagatttgttctgatctagacggcatctacttctctactcatttgatcgctgagtccctgcagggtatgagtagcagaggggactaactctcaggctactccagatctctagactcacagagctttctacagaaggggttggcaatctcaggagggcccaccatgcctaatctaatctgtcatctcccatattgcagggtaccggttccctaagtgagagctccatcccctctatttccgacaccagcaccccaagacgaagccgtcgccagctcccacctgtgccaccaaagcctcgtcccctcctctcctacagctccctgatgagacacactggcggcatctctccacctcctgatggaagtgagggtggatccccactggcctctcaagctctggagagcaacagcgcttgcctgaccgagtcttccaactccttgcacccccagcagggccagcatccttccccacagcactacatctccgagccctatctggccctccatgaagactcccacgcctcagactgtggcgaggaggagacactcacctttgaggcagccgtagccactagcttgggccggtccaataccattggctctgcgccacccctacggcacagctggcagatgcctaatgggcactatcggcggcggaggcgtggggggcctgggcctggcatgatgtgtggagctgtcagtgacctcctgagtgacacggaagaagacgataagtgctagaggctgccatcccctccgatgcatgctcttctctcacaaggagaaaaccaagaccaaattgggaagccagtgcggcccgggggggaggaagagggagaagaaagatggagaaaggacgccaatgcatcctcagcgaagaggaaggaaaagacagatggaaaaacagtcgaacccaccaatttggattatttccctttgcaacatgggcactgccatagtcctgcctctttgctggggaaaaaaaatacaagaatgtggggggtttattcccatgggagaagggacatgaaggtggcttggcttccgttgccccttcccacttttctataagctgcggcaggatctggctgacctgtgtctaagctcattgccctgggcagctgggaagactttccagcatcttaatgagggaagagttgaaatagcaggagaagaatctcctcaccagctcttgcactttggctgcccccaggggcaaccgcagcagcatctcatgcattatcttggggcttgctttcccccaaagagacacatgctaaatcaggagcactggatgctagtgggagatgggagggagggagagaagggccggagtagaagggcccaaggtgctgtggcaacagcagcaagggctggtctgggtgagaaaagccatagcccagcagcctgtaccatgaaggtgagggtcaaagaaacagaactggaggtgctggtgggtacagtcctagactctaacatttgtaactcacacagtaggtgctgtggtaggtaggctagaaaaggaggttctccagggcccacaaaggtgcctgtagctcttgtaagggtaatattaactccaatagcaagggccccaaccccagaagggttcagccacagtataggaactccatgcagttctccaccttggccctttagatactcgtcagagggaacccccaacagtaggggcgaggtagatggggagacttaaggcactctgggcagactcagttttccaacaaacataaaaggaactcagtgttggtggcagggctgtgaccacagtgggctggaggcaggcagcaggcctctgtcagacagcaagactaatgctaagccaagcccagaaaagccaggtattagcaactacatgttctctgccacttctccaaatggacagggaacacacatccaagggggtcactgcgtaatgacttctctacagatgagaaagcctggtagactgaaatgggaatgttcccaaggggcctggggatcccctgtgaggagaagtccttgagcctgaagctcatgcagcttggtttggggtttggggagtcagttgaggtacttaagataattaagtaactatacctcagttttgacctgagctgcggattttagtaaaataggctctgatgtggctcccactatctctgaatattccctgggccaggcctgggttccatccctccccagagtaaaggatgggtagaagacaaccttgggccactgagtcattcctaatcccccaaaccagaaacaccaagggaacttaggacccttcctcaagcacttccatcaataacacagttaaaagttccattctgtggaatgcatcccccctcccttaagcttctctctagtatcatcagagtgggtgaacagatacttgggagcagggtgttgggcaggactgccctctctggcctctgcacaggacgctctccatgagactggagaccaacacactgaaagttcagtggatcgagtctttatcctcttccagactaggcagagtcttttgggactcttgtgtaggagcagaatttcttagaagaaaattctcttttcatatgacatttcctttctattcttctgtcccattctttctaaccctgggctgacaccgcagcagcagcagcagttctgaaaagccaagttcatccatgtggccacattcatctgccacactctgccttctcttttgagtattgatggagctttcatgaaccatggtcagccccaaaccaaagtcatcccataacaggtgaccaacgaggccaacctaaggcctgccaaccctcagatcctccccttccacctccattgtcctctccctgtgtgctcaggggcagctaagaatacaagcatgatcctaagggacgtatgtgattgtttcataagacggatgctaggacttgtgttgtttttaaggttttctctgctcagcctcattccatgccaaagtgctgctgctataggcctctttgtgtgcacaaaattgctttccactatattggacatgcagctttccttaggggaagcctgcaacaggatggccattctgagccagcaaacctgttggatggtggtttgtgaaagtcaattgcagagatatagcactaccatccctataattggagaaatgtgggctggcagcacaatgaccagatatggaattcacctgcaaaggatagtatcagtaaatgcacactcacacacacgcacatgcacacgcgcacacacagccttgtaaagatatcaagtattatagctgtggtcaattaactgatcacatagtttattttttagcactggtgaccttataaacatttctttgttcaacttaccctgggtttcttttatcttggacaacacttacccttcattaagaccagaacatagaagaatttctattaagccacaaacacattattataataatctccagtttcctactgcctcctaataaacttgaatgccaacctccttccttgtagctgaccagagctttccctcctagctatcagagcctgtatctttctctttaaagggaagttgctttctcaaagcccatgtttctctttgcatcttccagtacatagcatgactctttgtggaaagtcttcttgcagaattctttagtcatatatctcattaccctgcaaaaatatttggtcctcatcacctcaaaacaagagagaggagaagagggggcatgacaagcagaagccaggcagggaggtggtatgactgcgcttgtgtttgggcatgccttttctcttaaggttccagacagcttttcatgtccctaccttcatatctgtaggagggtacagcagccttcaaagggataggaggttcaagccaatgtgccctgtgtgtcaggaaaaacacatgcccatgaaggaatggtaccctctagtaccaccaagctccacatgagccataatgatagggtccaaggggagggagttataccacacttctacctgaggattctaatttaactgaagttttcacttctggttccagctgttccagatgttctgaacatttctcttccttcactctgaggccacacgaagagtaccccatatcccagcctttagtcagcatctccctttcctacctacgtccatcccccaccaccacaggttctttgtgtgaactgtagtgctccttggtcttccagtcgagtctttgttttgctgcatgttagcacaccctgagatggttaaatccaagtgtatgagatgcagtaactgctcctgccatgctgttaggaaatggttccttctcatgaagccttgtctgaagcttcctgggtgagcttcacaagaccatttcaagggaactgtaaaagagtgcacacaggtctatgttcccaatagaggctcactacagagagattaggtctctttggtatagtggaacaaattttttaagtaatttcgatttatttttaaacatgaatatttttgttacatttctttctgaagcctgtaatgtctgtttttttgttttttttttttttttggatagaatttctaggtaggtagagcagggagttgggaactttgtttctcagcttggttataacaatgacaaagttgaagttctatgtaaaggaaaggtggacagtgggagggaatcagattgtctcctgatacgcagagatttttctgagatttgaaagaactttcactgcagttatccctataacagggtcatgtctgtcatgttttgaaacaatttccccaaggcttgaggctactgaggcaaagcagccattccttgggaaggattccctgtcccacccagcctggatgtgtccttccctcctggaccccagagcatcacatactccaagagaaacgggaatactttatgaagcaggtagaagaggatcagctgaccccatgtaggtgaccagtcacagcgtgatgattaacaccagacaagaacccctgaggaatctgatgcagttcagatgagttgtctttaaatatctccacatggagaatcttctcttaacaaaagctaaacaaaattaacttaggggttatgacccaactctcccatgaatgtgatcagaggcagccccatgttaagtgctgtctgtaccagtaagtagccttttgcagtgtttcctctctgaaccacccagaacaccctaggcaggtctgtcccaaacagcagcagctgataccttctccattggccaaagactgctagggtgttttgtcagctgtcacaggctacacccatagtacacagatgtactacatgaggggaaaggtatggaaaaaaataatcctatttgctttctggcagacatctatgcctttccgtgaatctttttggtgttttgggttttttccccttaattaatttcgtctgtgtcgtgtgtatcccagagaagtcacatgacaccaaaacaacaaattcacaaattggtccaacctaccccaagggtctagaaagcatctctgaatagagttcaagttagctcatttaatgggggctcccagcaaaatctaatatgattcctggtaaggtctgggcccttgcttctatttttaataggtttcttactgcccacacatttctatcatgctatgtactggaaggttagtgtcctaaccttctagatgcaaaaagagactttataataagccatgctactactatgtaaatacattcttgggtttcaagttcttgtttatctagttttggaagagctggagagacaatatagaagtattgagattaatgtttatttatatcagtttggtagtttttgtttgattgattatccaagtattttggaacaggcccaatctaggacagccaagaaggataaatctgtgttctacagtattctgaatttgcttcttttctaagactaatttctgtcaaattagtgctatgataattgagtcaaaaacctgaagttattgtctcctcccatctctgtatccaccccacccttctgtcttgttaagtggccttggacccttgtctccccatattctgcctctcctctttcaaaggtctgaaaatataacttagacttatgaaaaaaaactgctttgcccagcaaatcagtcaaagtcaaggaaattataagatacagaattatttcagaacaaaccttaaccaatacataatacagaatgtattctgcagtaagaagccaagtttaaacaatatagcaatgtgacaaatgaacatcataggaagctatagtgagtactatccaggcttcacaactcatctgtgccttcagtatggatattgcatgtatttcctttccctagttagggaaattgaaattctgatgcttgactagtacatgtgtgtgccgagggctctgagttaataattataaagcacgtgcctccacaagtcaagttggaaaaaccttcactcactatatcaaggacttgggaacttcttagcatttcttctaagcattgaatttttttaaggaaacctccatcttaatgggactgaggctaagtttgctttactcctgctttctacatcttatattttcttctcacattagcactctttttcttttcttaatccacgctgttttcattaatcagaaaagatgaattcctccaacaaacttcctactaccatcttctctttgtggacacttaagtcagagagtgagtaaccagaaactaacacagaagacaattacctagcctgggttagaaatgtgagtaaattttattttaattttttttcctacaagttttctcgagataaaaataggttggtctctatattctgaaaggacatgtttgaactcgaattgcatggttgcaccacttcctctttggttctcagagatgatgtcccctaaactaaataggaagccatcatcctcatctgccgtatctggcttggacctgatttgacgactcagctgttttctttgcgtcattcttatttcttataggtgatagtctatattgcccaagagctgatgctttaaagcaagtctatcaaggatatttatgagatgaacaaggaaaacatttaaatgtgtcaagtgccattaatcaatttttaaaataacggtaatatgaaatgagggctaaatagtgtaatctaactgccaattaaagtacacagtagttctggtcttagttacctttgatatgaagttataggccattaagcagatccccgtgggtttagtaaaaacataggcgtagcgttttaatggctacaataggggcgtacatttagaccgcaggttgaactttaatcagtgtttttctatcctggtgttttgtgaacaatccaaaatttctacaaagctaccctaagtgctgcaattgcagaggaacttccctcttggtggcattagaatgctcaggctgagtccaagatttagaattcacccagaaaaccaccaatggagaaacacttaatgcactaagtatgtttgacattctgtactggggacaagtgagtatagagaaagagagagacactattgaacaaagacaaagttgacatggaagatataaaaagtccccgaagagaacaagcttaaagatgtttgactttggattctacttcttgcttagatttggggtaaatgctttaatatgatattggattcagaggggttgctttggtaaactgacttgaatcccccccaaaattagtggattaatgaacatccttttcagacctgacagatggaggaggcaaaaagcagcccaaagaatctatgacttcagaaactcatatagtaagccaatactgcagagggcacagtacccttcttagcagcctttgtgccataggagggggaaagagcccatgtaggggacaggaggtgttttgtcaggaataaatttcaaatggtaaggtgcactggtactaacctcaaaggccaacattgtgggaaagtgatgacaggtatctaggtcatcccttccatcctttgggacccaaggagaggccttgatttgatcttagaaaatgaacatgggatgggatcaagagggaaattgagtgctctgcctaaggttgtcaaaaatgctgccacccacattatcaaacatgtgagtcaagcccatgagacgcccccttaagggcagcatccactggggtgtatcagcctgacactcctgcagtagtcataggtgattgaatggcagccaatgctggcccacccagagtattggtgcatctcgcctaacactggagttcaacagtgcatgttggtcaggtggatatcctgtaacataaatgctcgtttggatccaaaaggaaaaccattaaaaataaaaggaagatgaacaactttattgctgggggggtgggtcaaggaaaagtaaaataaaaccttgttgtaaagaatcaattggcctggttccccttgcttctcttgtctttgtctctgctgatgaagtagttacgggctttggtaggtggatcagcagcaggttcagtaatcaagacaagtcagggtcagtttagcccagttgtgaatacttctagatattctcaaagttcccaggacatgatggtctttaaaggttttcttcctattaaaaatgacccttttcatggaagaaaagaaatgaattgccctaaaactgatttctcaaaaaaattaaaaattaaaaaacaaaacaaaaacgagtttctagccaagggaatcagtctatcaggaaaagagattagcagcagacagtcactatacggagccatagaccttgtaattaaaaaactctaaggagcctccattctgaaggagggagatgactaaagaactcctcctgccgtgctgccagccttgggaggaagctgactcctcctcaaggctctgaggagatgctctctctcatctctcagcctacctggctttttactcaggtgtagtagttttctgactgaatggaggaaaagccatgccttgtatccatgggcccttttgactctccattctaggcaaagccatctgtgtcatcccctggggtaccaactttttctccaattctaaatatattatttaagttgcaatacttctaaattttggttagatagaaatcagcatttcaggatatatttctgtatcttggttaaagatcttcttttaagaattaagatactagatttcattaggtaagacttttttttgcttagggttgaacctttcaaaaatgtggtatgcagccatccatctcaagttctgaaggctgggtggaaagtttatacatccataaacaacttcttaggtttttttctaaatcatattgttctagtgattcaatcatggtttgaattggaaacaaatttgtcaactgctacatcaaagtggtatggcatggcacaatattttcttcaacaaaagtagatttatgaagttacctggattggttttttttttattttttcaggattattctaatctaaaactccagtccatatcctttcacaggctaataatactatgaaatacatacaaagaaaaaaacagatgctattctaaatttgtctctagcttctacaccataatctgagtttctaaggggttacatttacatgctatgccctaactccatacactgcttctggaatatcatatcctgacttgactcacataccatgttcttttgctatagacctagggtaattcccaaaccaaagtcccttaagtatttaagcatctaaatgtagtgtggcacacctctggtcccaatacttaggaggttgaagcaggaagacacagaatttttggccagtctgggctactctgtgagatcctaactttaaaaacaaagcaactcaagcaaaacacaatcgcaaaatattgagacaagttacagatgaatatggctttagaacacctaaaacaaaaaggccaccaacagattgggaaaggatctttaccaatcctaaatcagatacgggactaatatctaatatgtataaagcactcaagaggatggactccagaaaagcaaataaccctatttaaaatggggtacagagctaaacaaagaattcttaactgaggaataccaaatggctgaggagcacttggaaaaatgtccaacatccttaatcatcagggaaatgcaaatcagaacaaccctgagattccacctcacaccagtcagaatggctaagatcaaaaattcaggtgacagcagatgctggtgaggatgtggagaaagaggaacattcctccattgttggtgggattgcaagctggtacaaccactctggaagtcagtctggtggttcctcacaaaattggacatagtactacctgaagatccagcaattcctctcctgggcatatacccagaagatgtttcaactggtaataaggacacatgttccactatgttcatagcagccttatttataatagccagaagctggaaagaacccagatgtctctcagcagaggaatggatacagaaaatgtggtacatttacacaatggagtactactcagctattaaaatcaatgaatttatgaaattcttaggcaaatggatggatctggagtatatcatcctgagtgaggtaacacattcacaaaagaacacacatgatatgcactcactgataagtggatattacccagaaacttagaatatccaagatacattttgcagaacacatgaagttcaaaaagaaggaagaccaaagtgtggatagtttgctccttcttagaatggggaacaaaatgcccatggaaggagttacagagacaaagttaggagctgagacgggaggaccatctagagactgcctggggatccatcccatatacaaccaccaaactcagacactattgcatatgccagaaagattttgctgacaagactctgacatagctctctcttgtgaggctatgccagtgcctggcaaatacagaagtagatgctcacagtcatctattggatagaacacagggtccccaatgaaggagccagagaaagtacccaaagagctaaaggggtctacaaccccataggaacaacgatatgaactaaccagtacccccccccagagctgtgtctctagttgcatatgtagcagaggatggcctagtcagccatcaatgggaggagaggctgtttgtcttgcgaaaatcatattgcccagtacaggggaatgccagggtcaggaagcgggagtgggtgggttggggagcagggcaggggggagggtatatgggactttggggatagcatttgaaatgtaactaaagaaaatacctaatttttaaaaagaaaaaataataaaagaaaatggtaaaataaaaaaaaatagaacaccttaaacataagaagcaacaacggaagaggaagaggaaagaatacagaagaaatgaagagtgatgtgtacaggtacctagagagtccacagagggtaaactgttcatttactctgtgtccttgattaggtctgcatgcttaaaggaaaatgataactaattacctcaaagatctgctgttcagagaaagttattacatatcaagagatcggccagatacttccattgtactgataacccttcccttcctcatcaccacacagaggtgtattcctcaaacccaccacccctctgagctgaacctctcaggacctcattctagtcagtagagggtgttgggtgggtgggtatttcctgtcagttaataaaacaaatgcaaaggacaatttgaacttctatggaaaagtgaataaaagagctttaaaaaaagcaagcaaatcataattatataactgtttttaaatactccctccatttttgtcttagaaagaggccctcatttgcttattctccacttctaatttccatattcatttaataacaaaatgggagaaacattagtgggagatagtaattgtaaaagtagcaataaagttaatggcaacattaaaaacactgtacatataaacagcaatattcaaggcaatttaaaatgtcaagcaatacacaacttaacagcatgtgagaataaactatcaattcagggtcaatagactgacttttctttttttattgcataaaaaaaaacaagaaagaaaaagagaggagtacacagttatatacctacagtcctagcaccagggatgctggggcaggaatatcacaagtttgaagctagcctgggctatggaatttgaggccaatataggatacatagcaagcaagatcccatcttagtcttccattccccctacatgttatctgtactcctggccccccaaaaagaatatgaagtaaatgaatcctttaaaacaatcatccttaggtgggccattaaaaaattactaaaagccagcaatttaggaaataaattgatactcaatctttataggtgattgccaaaaagtcaggataccacaagtaaaacaatgtaagcccatctagaggaggagtccaatgcctccggacattggttcttgccctctgaatattcgacatttaaaaccatctctgtggataaaattaacatagctatagtacattatagcacataggaaccataaaccccagaatacttaagcaagaaagaggctagatatcaactatggcctggactatttccccttgcctaaaagaaattagattagaacaactgttaatttttctagcaaacaatgacatcacttcttgaggtggtcttagagaccccaatacaaccattcaaaagagaaatgcctgagaagggccttttgctcatgtgtccaggtgatccctttttgtagttttatcaaagttgtgcatcactgcccttgaagaagggaactcaaagtctcagctcattcatatctttcagcctcacacaccgatgcccgctcacaagccctgcatcagacccaggaaaaaaaaaataaatgaaagccagccattcaatagacccattcacatcagaagaactcagtacatgagttgtggtctaatagaaagaaagaaaaaaaaaacagcttgatttcttgacatagtggaaacacaggtttgcttgttctgcccgaaagcagatgccttgatgctaatgagaaaccagtgtagatagctggaatggggtggggaagtgaaaagggcatcatatcaatttggctagcaaggatgctgatgtatggttgtaggtaaacctctgctacacg

SEQ ID NO: 1275 - DNA, 9704 bp, Mus musculus
tccttcttcctctctacccctcaccccgaccaataaatcagcaaactgttacctagcggaccagtgcctgcctttctctcagccaggtgtgccagaagaggagctatgtttgaggaccgaccttctccacccctctccggtccctgaacaccaccccacgctggcattttgggggaaaatattccctctagaagccctacccccttcttcttcttcttcttctttttttttcttgaggaatggagcttcgcagaggttgcctttagattcaacagttcagagcagggctgaagagcctgcaggggtccccagaggcggtggtccctgcgcctgtgtggataaggctctgagcctgcctgtgtcttttctgcctcttgttgtgtgcgggtgttcggcgatcacctttgtgtgtcttctgtctgtttaaacttcaggatggctcgcttcggggaggcggtggtcgttggcaggccaggctcaggcgatggagactcggaccagagcaggaaccgacaaggaacccccgtcccggcctcggggccggcggccgcctacaagcagtcaaaagcgcagagggcgcggactatggctttgtacaaccccataccagtccggcagaactgtttcacggtcaacagatccctgttcatcttcggagaagataacattgtcaggaaatacgccaagaagctcatcgattggccgccatttgagtacatgatcctggccaccatcattgccaactgcatcgtcttggccctggagcagcatcttcctgaggatgacaagaccccaatgtctcgaagactggagaagacagaaccatatttcattgggatcttctgctttgaagctgggatcaaaattgtggctctagggttcatcttccataagggttcatacctccgtaatggctggaatgtcatggacttcatcgtggtccttagtggcatcctggccactgcgggaacccacttcaacacccacgtggacctgcggaccctccgggctgtgcgtgtcctgaggcctttaaagctggtatcaggaatacctagcctgcagatcgtgctgaagtctatcatgaaggccatggtgcctcttctgcagattggccttctgctcttctttgccatcctcatgtttgctatcattggcttggagttctacagtggcaagttgcatcgagcatgcttcatgaacaattcaggtattctagaggggtttgatcctcctcacccgtgtggtgtgcaaggctgcccggctggttatgaatgtaaggactggatcggccccaatgacgggatcacccagtttgacaacatcctttttgccgtgctgactgtcttccaatgcatcactatggaagggtggaccactgtgctgtacaataccaatgatgccttaggagccacctggaactggctgtacttcatccctctcatcatcatcggatccttctttgttctcaacctcgtcctgggagtgctttccggggaatttgccaaagaaagagagagagtggagaaccgaagagcgttcatgaagctccggcgccagcaacagattgagcgagaattgaacggctaccgtgcctggatagacaaagcagaggaagtcatgcttgctgaagaaaataaaaactcgggaacatcagccttggaagtgcttcgaagggcaaccatcaaaaggagccggacggaggccatgacccgagactccagcgatgagcactgcgttgatatctcttcagtgggcacacctcttgccagagccagtatcaagagcacaaaagtagatggggcctcctatttccggcacaaggaacggcttctgcgcatctctatccgccacatggtcaagtcccaagtcttttactggatcgtcctgagtgttgtggctcttaatactgcctgtgtggccattgttcatcacaaccagccacagtggctcactcacctcctctactatgcagagtttttgtttctgggactcttcctgttggagatgtccctgaagatgtatggcatggggccacgcctctattttcactcatccttcaactgctttgattttggggtcacagtgggcagcatctttgaggttgtctgggcaatcttcagacctggcacatcttttggaatcagtgtcttacgagctctccggctcctaaggatatttaaaataaccaagtattgggcatccctccggaatctggttgtctccttgatgagctccatgaagtctatcatcagcttactcttccttctcttcctcttcatcgttgtctttgctctcctgggaatgcagctctttggaggcaggtttaactttaatgatgggactccttcagctaattttgacaccttccctgcagctatcatgacagtgttccagatcctgacaggggaagactggaatgaggtgatgtacaatggcattcgctcccagggtggggtcagctcaggcatgtggtctgccatctacttcattgtgctcaccttgtttggaaactacacgctgctaaatgtattcttggccatcgctgtggacaatctggccaatgcccaggaactgaccaaggatgagcaggaggaagaagaagccttcaaccagaaacatgcactgcagaaggccaaggaggtcagcccgatgtctgctcccaacatgccttccattgaaagagacagaaggagaagacaccacatgtcgatgtgggagccacgcagcagccacctgagggagcggaggcgccggcaccacatgtctgtgtgggaacaacgcaccagccagctgaggaggcacatgcaaatgtctagccaagaagccctcaacaaagaggaggccccgccaatgaaccccctcaatccactcaacccactgagtcctctcaaccccctcaatgctcaccccagcctttatcggaggcccaggcccattgagggcctagccctaggtctgggtcttgaaaagtgtgaagaagaacgcatcagtcgtgggggctccctcaagggggacatagggggcctgactagcgccctggacaaccagaggagccccttgtccttgggcaaacgggagccaccgtggctgcctagatcctgtcatggaaactgtgacccaatccagcaggaggctgggggaggagagactgtggtgacttttgaggaccgggccaggcacaggcagagtcagaggcgaagccggcatcgccgagtcaggactgagggcaaggactctgcctctgcatcccgaagcaggtctgccagccaggagcggagtctggatgaaggggtgtccgttgagggggagaaggaacatgagcctcacagcagccacaggagcaaagagccgaccatccacgaagaggagagaacccaggacttaaggaggaccaacagtctgatggtccccaggggctctggactggtaggggctcttgatgaagcagaaacacctctagtccagccccaacctgagctggaagtggggaaggatgcagctctgacagagcaggaggctgaaggcagcagtgaacaagcccttcttggggacgtacagctggatgtgggccggggcattagccagagtgaaccggatctctcctgcatgacagccaacatggacaaggctaccacggagagcaccagtgtcacggtcgccatccctgatgtggaccccttggtggactcgacagtggtgaacattagcaacaagacggatggagaagccagtcccttgaaggaggcagagactaaagaggaagaagaagaggtagagaagaagaagaagcagaagaaggagaagcgagagactggaaaagccatggtgccccatagctctatgttcatcttcagcaccactaacccgatccgcagggcctgccactacattgtgaacctacgctactttgaaatgtgcattctcttggtgattgcggccagcagcattgccctggcagccgaggaccctgtactaactaactcggagcgtaacaaagtcctgagatatttcgactatgttttcacaggagtgtttacctttgagatggttataaagatgatagaccaaggcttgatcctgcaggatggatcatacttccgagacctctggaacatcctggactttgtagtagtggttggtgcattggtagcatttgctctggcgtaatcctctctctgcagaaccaacaaggggagggatatcaagactatcaagtctctgagggtacttcgagttctgcggccactgaaaaccatcaagcgcttgcccaagctgaaggctgtgtttgactgcgtggtgacctccttgaagaatgtcttcaacatactcattgtctacaagctcttcatgttcatctttgccgtcatcgctgttcagctattcaaaggaaagttcttttattgcactgacagttccaaggacacagagaaggagtgcataggcaactatgtagaccacgagaaaaacaagatggaggtgaagggccgggaatggaagcgtcatgaattccactatgacaacatcatctgggccctgcttaccctcttcacagtctctacaggggaaggatggcctcaggttctgcagcactctgtagatgtgacagaggaggacagaggcccaagtcgcagcaaccgcatggagatgtccatcttttatgtggtctactttgtggtcttccctttcttctttgtcaatatcttcgtggctctcattatcatcaccttccaggagcaaggggacaagatgatggaggagtgtagcctggagaagaatgagcgggcatgcatcgacttcgccattagtgccaaacctctcacccgctacatgccacagaacaggcacaccttccagtaccgtgtgtggcactttgtagtctccccatcctttgagtataccatcatggccatgattgccttgaacactgtcgtgctgatgatgaagtactactctgctccttgcacctatgagctcgccttaaagtacctgaacatcgccttcactatggtgttttccctggagtgtgtcctaaaggtcattgctttcggcttcctgaactatttccgagatacctggaacatctttgacttcatcacggtgatcggcagtatcacagaaattatcctgacagatagcaagctggtgaacaccagtggcttcaatatgagctttctgaagctcttccgagctgcacggctcataaagcttctgagacagggctacaccatccgcatcttactgtggaccttcgtgcagtcctttaaggctcttccctacgtctgccttctcattgccatgcttttcttcatctacgccatcattgggatgcaggtgtttggaaacataaagttagatgaggagagtcacatcaaccggcacaacaacttccggagtttctttgggtccctcatgctgcttttcaggagtgccacgggggaggcttggcaggagattatgctgtcctgtctcggtgagaagggttgtgagcctgacaccactgcaccctcagggcagaatgagagtgagcgctgtggcactgacctggcctacgtttattttgtctccttcatcttcttctgctccttcctgatgctcaacctgttcgtggctgtcatcatggacaactttgagtacctgactcgagattcctccatcctggggcctcaccacttagatgagtttgtccgtgtctgggcagaatatgacagagcagcatgtggccgcatccattacactgagatgtatgaaatgctgactctcatgtcaccaccgctaggcctcggcaagagatgtccctccaaagtggcctataagaggctggtcctgatgaacatgccagtggctgaggacatgacagtccacttcacctccacacttatggctctgatccggacagctctggacattaaaatcgccaaaggtggtgcagacagacagcagctagactcggagctgcaaaaagagaccctggccatttggcctcacctgtcccaaaagatgttggatctgcttgtgcccatgcccaaagcctctgacctgactgtgggcaagatctatgcagcaatgatgatcatggactactataaacagagtaaggtaaagaaacagagacagcagctggaagaacagaaaaatgcacccatgttccagcgcatggagccctcatcactgcctcaggagatcattgctaatgccaaagccctgccttatctccagcaggaccctgtttctggcctgagtggtcggagtggatacccttcaatgagtccactctcccctcaagaaatattccagttggcttgtatggacccagcggatgatggacaattccaggaacaacaatctctggtggtaacagaccctagctctatgcgacgttcattttctacaattcgggataagcgttcaaattcctcctggttggaggagttctccatggaacgcagcagtgaaaacacttacaagtcgcggcgcagaagttaccattcctccctgaggctgtcagcacaccgcctgaattctgactctggtcacaagtctgacactcaccgatcaggaggcagggagagaggccgatccaaagaacgaaagcacctcctctctccagatgtctcccgctgcaattctgaagagcgagggacccaggccgactgggagtccccagaacgtcgccagtccaggtcacccagtgaaggaaggtcacagacccccaatagacagggtaccggttccctaagtgagagctccatcccctctatttccgacaccagcaccccaagacgaagccgtcgccagctcccacctgtgccaccaaagcctcgtcccctcctctcctacagctccctgatgagacacactggcggcatctctccacctcctgatggaagtgagggtggatccccactggcctctcaagctctggagagcaacagcgcttgcctgaccgagtcttccaactccttgcacccccagcagggccagcatccttccccacagcactacatctccgagccctatctggccctccatgaagactcccacgcctcagactgtggcgaggaggagacactcacctttgaggcagccgtagccactagcttgggccggtccaataccattggctctgcgccacccctacggcacagctggcagatgcctaatgggcactatcggcggcggaggcgtggggggcctgggcctggcatgatgtgtggagctgtcagtgacctcctgagtgacacggaagaagacgataagtgctagaggctgccatcccctccgatgcatgctcttctctcacaaggagaaaaccaagaccaaattgggaagccagtgcggcccgggggggaggaagagggagaagaaagatggagaaaggacgccaatgcatcctcagcgaagaggaaggaaaagacagatggaaaaacagtcgaacccaccaatttggattatttccctttgcaacatgggcactgccatagtcctgcctctttgctggggaaaaaaaatacaagaatgtggggggtttattcccatgggagaagggacatgaaggtggcttggcttccgttgccccttcccacttttctataagctgcggcaggatctggctgacctgtgtctaagctcattgccctgggcagctgggaagactttccagcatcttaatgagggaagagttgaaatagcaggagaagaatctcctcaccagctcttgcactttggctgcccccaggggcaaccgcagcagcatctcatgcattatcttggggcttgctttcccccaaagagacacatgctaaatcaggagcactggatgctagtgggagatgggagggagggagagaagggccggagtagaagggcccaaggtgctgtggcaacagcagcaagggctggtctgggtgagaaaagccatagcccagcagcctgtaccatgaaggtgagggtcaaagaaacagaactggaggtgctggtgggtacagtcctagactctaacatttgtaactcacacagtaggtgctgtggtaggtaggctagaaaaggaggttctccagggcccacaaaggtgcctgtagctcttgtaagggtaatattaactccaatagcaagggccccaaccccagaagggttcagccacagtataggaactccatgcagttctccaccttggccctttagatactcgtcagagggaacccccaacagtaggggcgaggtagatggggagacttaaggcactctgggcagactcagttttccaacaaacataaaaggaactcagtgttggtggcagggctgtgaccacagtgggctggaggcaggcagcaggcctctgtcagacagcaagactaatgctaagccaagcccagaaaagccaggtattagcaactacatgttctctgccacttctccaaatggacagggaacacacatccaagggggtcactgcgtaatgacttctctacagatgagaaagcctggtagactgaaatgggaatgttcccaaggggcctggggatcccctgtgaggagaagtccttgagcctgaagctcatgcagcttggtttggggtttggggagtcagttgaggtacttaagataattaagtaactatacctcagttttgacctgagctgcggattttagtaaaataggctctgatgtggctcccactatctctgaatattccctgggccaggcctgggttccatccctccccagagtaaaggatgggtagaagacaaccttgggccactgagtcattcctaatcccccaaaccagaaacaccaagggaacttaggacccttcctcaagcacttccatcaataacacagttaaaagttccattctgtggaatgcatcccccctcccttaagcttctctctagtatcatcagagtgggtgaacagatacttgggagcagggtgttgggcaggactgccctctctggcctctgcacaggacgctctccatgagactggagaccaacacactgaaagttcagtggatcgagtctttatcctcttccagactaggcagagtcttttgggactcttgtgtaggagcagaatttcttagaagaaaattctcttttcatatgacatttcctttctattcttctgtcccattctttctaaccctgggctgacaccgcagcagcagcagcagttctgaaaagccaagttcatccatgtggccacattcatctgccacactctgccttctcttttgagtattgatggagctttcatgaaccatggtcagccccaaaccaaagtcatcccataacaggtgaccaacgaggccaacctaaggcctgccaaccctcagatcctccccttccacctccattgtcctctccctgtgtgctcaggggcagctaagaatacaagcatgatcctaagggacgtatgtgattgtttcataagacggatgctaggacttgtgttgtttttaaggttttctctgctcagcctcattccatgccaaagtgctgctgctataggcctctttgtgtgcacaaaattgctttccactatattggacatgcagctttccttaggggaagcctgcaacaggatggccattctgagccagcaaacctgttggatggtggtttgtgaaagtcaattgcagagatatagcactaccatccctataattggagaaatgtgggctggcagcacaatgaccagatatg

SEQ ID NO: 1276 - protein, 1260 aa, Mus musculus
GSEPACVFSASCCVRVFGDHLCVSSVCLNFRMARFGEAVVVGRPGSGDGDSDQSRNRQGTPVPASGPAAAYKQSKAQRARTMALYNPIPVRQNCFTVNRSLFIFGEDNIVRKYAKKLIDWPPFEYMILATIIANCIVLALEQHLPEDDKTPMSRRLEKTEPYFIGIFCFEAGIKIVGFIFHKGSYLRNGWNVMDFIVVLSGILATAGTHFNTHVDLRTLRAVRVLRPLKLVSGIPSLQIVLKSIMKAMVPLLQIGLLLFFAILMFAIIGLEFYSGKLHRACFMNNSGIGFDPPHPCGVQGCPAGYECKDWIGPNDGITQFDNILFAVLTVFQCITMEGWTTVLYNTNDALGATWNWLYFIPLIIIGSFFVLNLVLGVLSGEFAKERERVENRRAFMKLRRQQQIERELNGYRAWIDKAEEVMLAEENKNSGTSALEVLRRATIKRSRTEAMTRDSSDEHCVDISSVGTPLARASIKSTKVDGASYFRHKERLLRISIRHMVKSQVFYWIVLSVVNTACVAIVHHNQPQWLTHLLYYAEFLFLGLFLLEMSLKMYGMGPRLYFHSSFNCFDFGVTVGSIFEVVWAIFRPGTSFGISVLRALRLLRIFKITKYWASLRNLVVSLMSSMKSIISLLFLLFLFIVVFALLGMQLFGGRFNFNDGTPSANFDTFPAAIMTVFQILTGEDWNEVMYNGIRSQGGVSSGMWSAIYFIVLTLFGNYTLLNVFLAIAVDNLANAQELTKDEQEEEEAFNQKHALQKAKEVSPMSAPNMPSIERDRRRRHHMSMWEPRSSHLRERRRRHHMSVWEQRTSQLRRHMQMSSQEALNKEEAPPMNPLNPLNPLSPLNPLNAHPSLYRRPRPIEGLALGLGLEKCEEERISRGGSLKGDIGGLTSALDNQRSPLSLGKREPPWLPRSCHGNCDPIQQEAGGGETVVTFEDRARHRQSQRRSRHRRVRTEGKDSASASRSRSASQERSLDEGVSVEGEKEHEPHSSHRSKEPTIHEEERTQDLRRTNSLMVPRGSGLVGALDEAETPLVQPQPELEVGKDAALTEQEAEGSSEQALLGDVQLDVGRGISQSEPDLSCMTANMDKATTESTSVTVAIPDVDPLVDSTVVNISNKTDGEDLKEAETKEEEEEVEKKKKQKKEKRETGKAMVPHSSMFIFSTTNPIRRACHYIVNLRYFEMCILLVIAASSIAAEDPVLTNSNKVLRYFDYVFTGVFTFEMVIKMIDQGLILQDGSYFRDLWNILDFVVVVGALVAFA
